(19) United States
(12) Patent Application Publication
(10) Pub. No.: US 2023/0416732 A1
(43) Pub. Date: Dec. 28, 2023

(54) COMPOSITIONS COMPRISING AN RNA GUIDE TARGETING BCL11A AND USES THEREOF

(71) Applicant: Arbor Biotechnologies, Inc., Cambridge, MA (US)

(72) Inventors: Quinton Norman Wessells, Cambridge, MA (US); Jeffrey Raymond Haswell, Newton, MA (US); Tia Marie Ditommaso, Waltham, MA (US); Noah Michael Jakimo, Cambridge, MA (US)

(21) Appl. No.: 18/251,183

(22) PCT Filed: Oct. 29, 2021
(86) PCT No.: PCT/US2021/057426

§ 371 Date: Apr. 28, 2023

Related U.S. Application Data
(60) Provisional application No. 63/252,832, filed on Oct. 6, 2021.
(60) Provisional application No. 63/108,110, filed on Oct. 30, 2020.

(51) Int. Cl. C12N 15/11; C12N 9/22; C12N 15/10; C12N 15/90

(52) U.S. Cl. CPC C12N 15/11; C12N 9/22; C12N 15/102; C12N 15/907; C12N 2310/20

(57) ABSTRACT

The present invention relates to compositions comprising RNA guides targeting BCL11A, processes for characterizing the compositions, cells comprising the compositions, and methods of using the compositions.

### SEQUENCE LISTING

[0001] The instant application contains a Sequence Listing which has been submitted electronically in ASCII format and is hereby incorporated by reference in its entirety. Said ASCII copy, created on Oct. 28, 2021, is named 51451-017WO3_Sequence_Listing_10_28_21_ST25, and is 682,314 bytes in size.

### BACKGROUND

[0002] Clustered Regularly Interspaced Short Palindromic Repeats (CRISPR) and CRISPR-associated (Cas) genes, collectively known as CRISPR-Cas or CRISPR/Cas systems, are adaptive immune systems in archaea and bacteria that defend particular species against foreign genetic elements.

### SUMMARY OF THE INVENTION

[0003] It is against the above background that the present invention provides certain advantages and advancements over the prior art. Although this invention disclosed herein is not limited to specific advantages or functionalities, the invention provides a composition comprising an RNA guide, wherein the RNA guide comprises (i) a spacer sequence that is substantially complementary to a target sequence within a BCL11A gene and (ii) a direct repeat sequence; wherein the target sequence is adjacent to a protospacer adjacent motif (PAM) comprising the sequence 5′-NTTN-3′.

[0004] In one aspect of the composition, the target sequence is within exon 1, exon 2, exon 3, exon 4, or the enhancer region of the BCL11A gene.

[0005] In another aspect of the composition, the BCL11A gene comprises the sequence of SEQ ID NO: 2635, the reverse complement of SEQ ID NO: 2635, a variant of SEQ ID NO: 2635, or the reverse complement of a variant of SEQ ID NO: 2635.

[0006] In another aspect of the composition, the spacer sequence comprises: a. nucleotide 1 through nucleotide 16 of a sequence that is at least 90% identical to a sequence of any one of SEQ ID NOs: 1322-2632; b. nucleotide 1 through nucleotide 17 of a sequence that is at least 90% identical to a sequence of any one of SEQ ID NOs: 1322-2632; c. nucleotide 1 through nucleotide 18 of a sequence that is at least 90% identical to a sequence of any one of SEQ ID NOs: 1322-2632; d. nucleotide 1 through nucleotide 19 of a sequence that is at least 90% identical to a sequence of any one of SEQ ID NOs: 1322-2632; e. nucleotide 1 through nucleotide 20 of a sequence that is at least 90% identical to a sequence of any one of SEQ ID NOs: 1322-2632; f. nucleotide 1 through nucleotide 21 of a sequence that is at least 90% identical to a sequence of any one of SEQ ID NOs: 1322-2632; g. nucleotide 1 through nucleotide 22 of a sequence that is at least 90% identical to a sequence of any one of SEQ ID NOs: 1322-2632; h. nucleotide 1 through nucleotide 23 of a sequence that is at least 90% identical to a sequence of any one of SEQ ID NOs: 1322-2632; i. nucleotide 1 through nucleotide 24 of a sequence that is at least 90% identical to a sequence of any one of SEQ ID NOs: 1322-2632; j. nucleotide 1 through nucleotide 25 of a sequence that is at least 90% identical to a sequence of any one of SEQ ID NOs: 1322-2632; k. nucleotide 1 through nucleotide 26 of a sequence that is at least 90% identical to a sequence of any one of SEQ ID NOs: 1322-2632; 1. nucleotide 1 through nucleotide 27 of a sequence that is at least 90% identical to a sequence of any one of SEQ ID NOs: 1322-2632; m. nucleotide 1 through nucleotide 28 of a sequence that is at least 90% identical to a sequence of any one of SEQ ID NOs: 1322-2632; n. nucleotide 1 through nucleotide 29 of a sequence that is at least 90% identical to a sequence of any one of SEQ ID NOs: 1322-1425 and 1427-2632; or o. nucleotide 1 through nucleotide 30 of a sequence that is at least 90% identical to a sequence of any one of SEQ ID NOs: 1322-1425 and 1427-2632.

[0007] In another aspect of the composition, the spacer sequence comprises: a. nucleotide 1 through nucleotide 16 of any one of SEQ ID NOs: 1322-2632; b. nucleotide 1 through nucleotide 17 of any one of SEQ ID NOs: 1322-2632; c. nucleotide 1 through nucleotide 18 of any one of SEQ ID NOs: 1322-2632; d. nucleotide 1 through nucleotide 19 of any one of SEQ ID NOs: 1322-2632; e. nucleotide 1 through nucleotide 20 of any one of SEQ ID NOs: 1322-2632; f. nucleotide 1 through nucleotide 21 of any one of SEQ ID NOs: 1322-2632; g. nucleotide 1 through nucleotide 22 of any one of SEQ ID NOs: 1322-2632; h. nucleotide 1 through nucleotide 23 of any one of SEQ ID NOs: 1322-2632; i. nucleotide 1 through nucleotide 24 of any one of SEQ ID NOs: 1322-2632; j. nucleotide 1 through nucleotide 25 of any one of SEQ ID NOs: 1322-2632; k. nucleotide 1 through nucleotide 26 of any one of SEQ ID NOs: 1322-2632; 1. nucleotide 1 through nucleotide 27 of any one of SEQ ID NOs: 1322-2632; m. nucleotide 1 through nucleotide 28 of any one of SEQ ID NOs: 1322-2632; n. nucleotide 1 through nucleotide 29 of any one of SEQ ID NOs: 1322-1425 and 1427-2632; or o. nucleotide 1 through nucleotide 30 of any one of SEQ ID NOs: 1322-1425 and 1427-2632.

[0008] In another aspect of the composition, the direct repeat comprises: a. nucleotide 1 through nucleotide 36 of a sequence that is at least 90% identical to a sequence of any one of SEQ ID NOs: 1-8; b. nucleotide 2 through nucleotide 36 of a sequence that is at least 90% identical to a sequence of any one of SEQ ID NOs: 1-8; c. nucleotide 3 through nucleotide 36 of a sequence that is at least 90% identical to a sequence of any one of SEQ ID NOs: 1-8; d. nucleotide 4 through nucleotide 36 of a sequence that is at least 90% identical to a sequence of any one of SEQ ID NOs: 1-8; e. nucleotide 5 through nucleotide 36 of a sequence that is at least 90% identical to a sequence of any one of SEQ ID NOs: 1-8; f. nucleotide 6 through nucleotide 36 of a sequence that is at least 90% identical to a sequence of any one of SEQ ID NOs: 1-8; g. nucleotide 7 through nucleotide 36 of a sequence that is at least 90% identical to a sequence of any one of SEQ ID NOs: 1-8; h. nucleotide 8 through nucleotide 36 of a sequence that is at least 90% identical to a sequence of any one of SEQ ID NOs: 1-8; i. nucleotide 9 through nucleotide 36 of a sequence that is at least 90% identical to a sequence of any one of SEQ ID NOs: 1-8; j. nucleotide 10 through nucleotide 36 of a sequence that is at least 90% identical to a sequence of any one of SEQ ID NOs: 1-8; k. nucleotide 11 through nucleotide 36 of a sequence that is at least 90% identical to a sequence of any one of SEQ ID NOs: 1-8; 1. nucleotide 12 through nucleotide 36 of a sequence that is at least 90% identical to a sequence of any one of SEQ ID NOs: 1-8; m. nucleotide 13 through nucleotide 36 of a sequence that is at least 90% identical to a sequence of any one of SEQ ID NOs: 1-8; n. nucleotide 14 through nucleotide 36 of a sequence that is at least 90% identical to a sequence of any one of SEQ ID NOs: 1-8; o. nucleotide 1 through nucleotide 34 of a sequence that is at least 90% identical to a sequence of SEQ ID NO: 9; p. nucleotide 2 through nucleotide 34 of a sequence that is at least 90% identical to a sequence of SEQ ID NO: 9; q. nucleotide 3 through nucleotide 34 of a sequence that is at least 90% identical to a sequence of SEQ ID NO: 9; r. nucleotide 4 through nucleotide 34 of a sequence that is at least 90% identical to a sequence of SEQ ID NO: 9; s. nucleotide 5 through nucleotide 34 of a sequence that is at least 90% identical to a sequence of SEQ ID NO: 9; t. nucleotide 6 through nucleotide 34 of a sequence that is at least 90% identical to a sequence of SEQ ID NO: 9; u. nucleotide 7 through nucleotide 34 of a sequence that is at least 90% identical to a sequence of SEQ ID NO: 9; v. nucleotide 8 through nucleotide 34 of a sequence that is at least 90% identical to a sequence of SEQ ID NO: 9; w. nucleotide 9 through nucleotide 34 of a sequence that is at least 90% identical to a sequence of SEQ ID NO: 9; x. nucleotide 10 through nucleotide 34 of a sequence that is at least 90% identical to a sequence of SEQ ID NO: 9; y. nucleotide 11 through nucleotide 34 of a sequence that is at least 90% identical to a sequence of SEQ ID NO: 9; z. nucleotide 12 through nucleotide 34 of a sequence that is at least 90% identical to a sequence of SEQ ID NO: 9; or aa. a sequence that is at least 90% identical to a sequence of SEQ ID NO: 10 or a portion thereof.

[0009] In another aspect of the composition, the direct repeat comprises: a. nucleotide 1 through nucleotide 36 of any one of SEQ ID NOs: 1-8; b. nucleotide 2 through nucleotide 36 of any one of SEQ ID NOs: 1-8; c. nucleotide 3 through nucleotide 36 of any one of SEQ ID NOs: 1-8; d. nucleotide 4 through nucleotide 36 of any one of SEQ ID NOs: 1-8; e. nucleotide 5 through nucleotide 36 of any one of SEQ ID NOs: 1-8; f. nucleotide 6 through nucleotide 36 of any one of SEQ ID NOs: 1-8; g. nucleotide 7 through nucleotide 36 of any one of SEQ ID NOs: 1-8; h. nucleotide 8 through nucleotide 36 of any one of SEQ ID NOs: 1-8; i. nucleotide 9 through nucleotide 36 of any one of SEQ ID NOs: 1-8; j. nucleotide 10 through nucleotide 36 of any one of SEQ ID NOs: 1-8; k. nucleotide 11 through nucleotide 36 of any one of SEQ ID NOs: 1-8; 1. nucleotide 12 through nucleotide 36 of any one of SEQ ID NOs: 1-8; m. nucleotide 13 through nucleotide 36 of any one of SEQ ID NOs: 1-8; n. nucleotide 14 through nucleotide 36 of any one of SEQ ID NOs: 1-8; o. nucleotide 1 through nucleotide 34 of SEQ ID NO: 9; p. nucleotide 2 through nucleotide 34 of SEQ ID NO: 9; q. nucleotide 3 through nucleotide 34 of SEQ ID NO: 9; r. nucleotide 4 through nucleotide 34 of SEQ ID NO: 9; s. nucleotide 5 through nucleotide 34 of SEQ ID NO: 9; t. nucleotide 6 through nucleotide 34 of SEQ ID NO: 9; u. nucleotide 7 through nucleotide 34 of SEQ ID NO: 9; v. nucleotide 8 through nucleotide 34 of SEQ ID NO: 9; w. nucleotide 9 through nucleotide 34 of SEQ ID NO: 9; x. nucleotide 10 through nucleotide 34 of SEQ ID NO: 9; y. nucleotide 11 through nucleotide 34 of SEQ ID NO: 9; z. nucleotide 12 through nucleotide 34 of SEQ ID NO: 9; or aa. SEQ ID NO: 10 or a portion thereof.

[0010] In another aspect of the composition, the direct repeat comprises: a. nucleotide 1 through nucleotide 36 of a sequence that is at least 90% identical to a sequence of any one of SEQ ID NOs: 2652-2669; b. nucleotide 2 through nucleotide 36 of a sequence that is at least 90% identical to a sequence of any one of SEQ ID NOs: 2652-2669; c. nucleotide 3 through nucleotide 36 of a sequence that is at least 90% identical to a sequence of any one of SEQ ID NOs: 2652-2669; d. nucleotide 4 through nucleotide 36 of a sequence that is at least 90% identical to a sequence of any one of SEQ ID NOs: 2652-2669; e. nucleotide 5 through nucleotide 36 of a sequence that is at least 90% identical to a sequence of any one of SEQ ID NOs: 2652-2669; f. nucleotide 6 through nucleotide 36 of a sequence that is at least 90% identical to a sequence of any one of SEQ ID NOs: 2652-2669; g. nucleotide 7 through nucleotide 36 of a sequence that is at least 90% identical to a sequence of any one of SEQ ID NOs: 2652-2669; h. nucleotide 8 through nucleotide 36 of a sequence that is at least 90% identical to a sequence of any one of SEQ ID NOs: 2652-2669; i. nucleotide 9 through nucleotide 36 of a sequence that is at least 90% identical to a sequence of any one of SEQ ID NOs: 2652-2669; j. nucleotide 10 through nucleotide 36 of a sequence that is at least 90% identical to a sequence of any one of SEQ ID NOs: 2652-2669; k. nucleotide 11 through nucleotide 36 of a sequence that is at least 90% identical to a sequence of any one of SEQ ID NOs: 2652-2669; 1. nucleotide 12 through nucleotide 36 of a sequence that is at least 90% identical to a sequence of any one of SEQ ID NOs: 2652-2669; m. nucleotide 13 through nucleotide 36 of a sequence that is at least 90% identical to a sequence of any one of SEQ ID NOs: 2652-2669; n. nucleotide 14 through nucleotide 36 of a sequence that is at least 90% identical to a sequence of any one of SEQ ID NOs: 2652-2669; or o. a sequence that is at least 90% identical to a sequence of SEQ ID NO: 2670 or a portion thereof.

[0011] In another aspect of the composition, the direct repeat comprises: a. nucleotide 1 through nucleotide 36 of any one of SEQ ID NOs: 2652-2669; b. nucleotide 2 through nucleotide 36 of any one of SEQ ID NOs: 2652-2669; c. nucleotide 3 through nucleotide 36 of any one of SEQ ID NOs: 2652-2669; d. nucleotide 4 through nucleotide 36 of any one of SEQ ID NOs: 2652-2669; e. nucleotide 5 through nucleotide 36 of any one of SEQ ID NOs: 2652-2669; f. nucleotide 6 through nucleotide 36 of any one of SEQ ID NOs: 2652-2669; g. nucleotide 7 through nucleotide 36 of any one of SEQ ID NOs: 2652-2669; h. nucleotide 8 through nucleotide 36 of any one of SEQ ID NOs: 2652-2669; i. nucleotide 9 through nucleotide 36 of any one of SEQ ID NOs: 2652-2669; j. nucleotide 10 through nucleotide 36 of any one of SEQ ID NOs: 2652-2669; k. nucleotide 11 through nucleotide 36 of any one of SEQ ID NOs: 2652-2669; 1. nucleotide 12 through nucleotide 36 of any one of SEQ ID NOs: 2652-2669; m. nucleotide 13 through nucleotide 36 of any one of SEQ ID NOs: 2652-2669; n. nucleotide 14 through nucleotide 36 of any one of SEQ ID NOs: 2652-2669; or o. SEQ ID NO: 2670 or a portion thereof.

[0012] In another aspect of the composition, the direct repeat comprises: a. nucleotide 1 through nucleotide 36 of a sequence that is at least 90% identical to SEQ ID NO: 2671; b. nucleotide 2 through nucleotide 36 of a sequence that is at least 90% identical to SEQ ID NO: 2671; c. nucleotide 3 through nucleotide 36 of a sequence that is at least 90% identical to SEQ ID NO: 2671; d. nucleotide 4 through nucleotide 36 of a sequence that is at least 90% identical to SEQ ID NO: 2671; e. nucleotide 5 through nucleotide 36 of a sequence that is at least 90% identical to SEQ ID NO: 2671; f. nucleotide 6 through nucleotide 36 of a sequence that is at least 90% identical to SEQ ID NO: 2671; g. nucleotide 7 through nucleotide 36 of a sequence that is at least 90% identical to SEQ ID NO: 2671; h. nucleotide 8 through nucleotide 36 of a sequence that is at least 90% identical to SEQ ID NO: 2671; i. nucleotide 9 through nucleotide 36 of a sequence that is at least 90% identical to SEQ ID NO: 2671; j. nucleotide 10 through nucleotide 36 of a sequence that is at least 90% identical to SEQ ID NO: 2671; k. nucleotide 11 through nucleotide 36 of a sequence that is at least 90% identical to SEQ ID NO: 2671; 1. nucleotide 12 through nucleotide 36 of a sequence that is at least 90% identical to SEQ ID NO: 2671; m. nucleotide 13 through nucleotide 36 of a sequence that is at least 90% identical to SEQ ID NO: 2671; n. nucleotide 14 through nucleotide 36 of a sequence that is at least 90% identical to SEQ ID NO: 2671; or o. a sequence that is at least 90% identical to a sequence of SEQ ID NO: 2672 or SEQ ID NO: 2673 or a portion thereof.

[0013] In another aspect of the composition, the direct repeat comprises: a. nucleotide 1 through nucleotide 36 of SEQ ID NO: 2671; b. nucleotide 2 through nucleotide 36 of SEQ ID NO: 2671; c. nucleotide 3 through nucleotide 36 of SEQ ID NO: 2671; d. nucleotide 4 through nucleotide 36 of SEQ ID NO: 2671; e. nucleotide 5 through nucleotide 36 of SEQ ID NO: 2671; f. nucleotide 6 through nucleotide 36 of SEQ ID NO: 2671; g. nucleotide 7 through nucleotide 36 of SEQ ID NO: 2671; h. nucleotide 8 through nucleotide 36 of SEQ ID NO: 2671; i. nucleotide 9 through nucleotide 36 of SEQ ID NO: 2671; j. nucleotide 10 through nucleotide 36 of SEQ ID NO: 2671; k. nucleotide 11 through nucleotide 36 of SEQ ID NO: 2671; 1. nucleotide 12 through nucleotide 36 of SEQ ID NO: 2671; m. nucleotide 13 through nucleotide 36 of SEQ ID NO: 2671; n. nucleotide 14 through nucleotide 36 of SEQ ID NO: 2671; or o. SEQ ID NO: 2672 or SEQ ID NO: 2673 or a portion thereof.

[0014] In another aspect of the composition, the direct repeat comprises: a. nucleotide 1 through nucleotide 36 of a sequence that is at least 90% identical to a sequence of SEQ ID NO: 2674 or SEQ ID NO: 2675; b. nucleotide 2 through nucleotide 36 of a sequence that is at least 90% identical to a sequence of SEQ ID NO: 2674 or SEQ ID NO: 2675; c. nucleotide 3 through nucleotide 36 of a sequence that is at least 90% identical to a sequence of SEQ ID NO: 2674 or SEQ ID NO: 2675; d. nucleotide 4 through nucleotide 36 of a sequence that is at least 90% identical to a sequence of SEQ ID NO: 2674 or SEQ ID NO: 2675; e. nucleotide 5 through nucleotide 36 of a sequence that is at least 90% identical to a sequence of SEQ ID NO: 2674 or SEQ ID NO: 2675; f. nucleotide 6 through nucleotide 36 of a sequence that is at least 90% identical to a sequence of SEQ ID NO: 2674 or SEQ ID NO: 2675; g. nucleotide 7 through nucleotide 36 of a sequence that is at least 90% identical to a sequence of SEQ ID NO: 2674 or SEQ ID NO: 2675; h. nucleotide 8 through nucleotide 36 of a sequence that is at least 90% identical to a sequence of SEQ ID NO: 2674 or SEQ ID NO: 2675; i. nucleotide 9 through nucleotide 36 of a sequence that is at least 90% identical to a sequence of SEQ ID NO: 2674 or SEQ ID NO: 2675; j. nucleotide 10 through nucleotide 36 of a sequence that is at least 90% identical to a sequence of SEQ ID NO: 2674 or SEQ ID NO: 2675; k. nucleotide 11 through nucleotide 36 of a sequence that is at least 90% identical to a sequence of SEQ ID NO: 2674 or SEQ ID NO: 2675; 1. nucleotide 12 through nucleotide 36 of a sequence that is at least 90% identical to a sequence of SEQ ID NO: 2674 or SEQ ID NO: 2675; m. nucleotide 13 through nucleotide 36 of a sequence that is at least 90% identical to a sequence of SEQ ID NO: 2674 or SEQ ID NO: 2675; n. nucleotide 14 through nucleotide 36 of a sequence that is at least 90% identical to a sequence of SEQ ID NO: 2674 or SEQ ID NO: 2675; o. nucleotide 15 through nucleotide 36 of a sequence that is at least 90% identical to a sequence of SEQ ID NO: 2674 or SEQ ID NO: 2675; or p. a sequence that is at least 90% identical to a sequence of SEQ ID NO: 2676 or a portion thereof.

[0015] In another aspect of the composition, the direct repeat comprises: a. nucleotide 1 through nucleotide 36 of SEQ ID NO: 2674 or SEQ ID NO: 2675; b. nucleotide 2 through nucleotide 36 of SEQ ID NO: 2674 or SEQ ID NO: 2675; c. nucleotide 3 through nucleotide 36 of SEQ ID NO: 2674 or SEQ ID NO: 2675; d. nucleotide 4 through nucleotide 36 of SEQ ID NO: 2674 or SEQ ID NO: 2675; e. nucleotide 5 through nucleotide 36 of SEQ ID NO: 2674 or SEQ ID NO: 2675; f. nucleotide 6 through nucleotide 36 of SEQ ID NO: 2674 or SEQ ID NO: 2675; g. nucleotide 7 through nucleotide 36 of SEQ ID NO: 2674 or SEQ ID NO: 2675; h. nucleotide 8 through nucleotide 36 of SEQ ID NO: 2674 or SEQ ID NO: 2675; i. nucleotide 9 through nucleotide 36 of SEQ ID NO: 2674 or SEQ ID NO: 2675; j. nucleotide 10 through nucleotide 36 of SEQ ID NO: 2674 or SEQ ID NO: 2675; k. nucleotide 11 through nucleotide 36 of SEQ ID NO: 2674 or SEQ ID NO: 2675; 1. nucleotide 12 through nucleotide 36 of SEQ ID NO: 2674 or SEQ ID NO: 2675; m. nucleotide 13 through nucleotide 36 of SEQ ID NO: 2674 or SEQ ID NO: 2675; n. nucleotide 14 through nucleotide 36 of SEQ ID NO: 2674 or SEQ ID NO: 2675; o. nucleotide 15 through nucleotide 36 of SEQ ID NO: 2674 or SEQ ID NO: 2675; or p. SEQ ID NO: 2676 or a portion thereof.

[0016] In another aspect of the composition, the spacer sequence is substantially complementary to the complement of a sequence of any one of SEQ ID NOs: 11-1321.

[0017] In another aspect of the composition, the PAM comprises the sequence 5′-ATTA-3′, 5′-ATTT-3′, 5′-ATTG-3′, 5′-ATTC-3′, 5′-TTTA-3′, 5′-TTTT-3′, 5′-TTTG-3′, 5′-TTTC-3′, 5′-GTTA-3′, 5′-GTTT-3′, 5′-GTTG-3′, 5′-GTTC-3′, 5′-CTTA-3′, 5′-CTTT-3′, 5′-CTTG-3′, or 5′-CTTC-3′.

[0018] In another aspect of the composition, the target sequence is immediately adjacent to the PAM sequence.

[0019] In another aspect of the composition, the composition further comprises a Cas12i polypeptide.

[0020] In another aspect of the composition, the Cas12i polypeptide is: a. a Cas12i2 polypeptide comprising a sequence that is at least 90% identical to the sequence of SEQ ID NO: 2634, SEQ ID NO: 2641, SEQ ID NO: 2642, SEQ ID NO: 2643, SEQ ID NO: 2644, or SEQ ID NO: 2645; b. a Cas12i4 polypeptide comprising a sequence that is at least 90% identical to the sequence of SEQ ID NO: 2647, SEQ ID NO: 2648, or SEQ ID NO: 2649; c. a Cas12i1 polypeptide comprising a sequence that is at least 90% identical to the sequence of SEQ ID NO: 2650; or d. a Cas12i3 polypeptide comprising a sequence that is at least 90% identical to the sequence of SEQ ID NO: 2651.

[0021] In another aspect of the composition, the Cas12i polypeptide is: a. a Cas12i2 polypeptide comprising a sequence of SEQ ID NO: 2634, SEQ ID NO: 2641, SEQ ID NO: 2642, SEQ ID NO: 2643, SEQ ID NO: 2644, or SEQ ID NO: 2645; b. a Cas12i4 polypeptide comprising a sequence of SEQ ID NO: 2647, SEQ ID NO: 2648, or SEQ ID NO: 2649; c. a Cas12i1 polypeptide comprising a sequence of SEQ ID NO: 2650; or d. a Cas12i3 polypeptide comprising a sequence of SEQ ID NO: 2651.

[0022] In another aspect of the composition, the RNA guide and the Cas12i polypeptide form a ribonucleoprotein complex.

[0023] In another aspect of the composition, the ribonucleoprotein complex binds a target nucleic acid.

[0024] In another aspect of the composition, the composition is present within a cell.

[0025] In another aspect of the composition, the RNA guide and the Cas12i polypeptide are encoded in a vector, e.g., expression vector. In another aspect of the composition, the RNA guide and the Cas12i polypeptide are encoded in a single vector or the RNA guide is encoded in a first vector and the Cas12i polypeptide is encoded in a second vector.

[0026] The invention further provides a vector system comprising one or more vectors encoding an RNA guide disclosed herein and a Cas12i polypeptide. In an embodiment, the vector system comprises a first vector encoding an RNA guide disclosed herein and a second vector encoding a Cas12i polypeptide. The vectors may be expression vectors.

[0027] The invention further provides a composition comprising an RNA guide and a Cas12i polypeptide, wherein the RNA guide comprises (i) a spacer sequence that is substantially complementary to a target sequence within a BCL11A gene and (ii) a direct repeat sequence.

[0028] In one aspect of the composition, the target sequence is within exon 1, exon 2, exon 3, exon 4, or the enhancer region of the BCL11A gene.

[0029] In another aspect of the composition, the BCL11A gene comprises the sequence of SEQ ID NO: 2635, the reverse complement of SEQ ID NO: 2635, a variant of SEQ ID NO: 2635, or the reverse complement of a variant of SEQ ID NO: 2635.

[0030] In another aspect of the composition, the spacer sequence comprises: a. nucleotide 1 through nucleotide 16 of a sequence that is at least 90% identical to a sequence of any one of SEQ ID NOs: 1322-2632; b. nucleotide 1 through nucleotide 17 of a sequence that is at least 90% identical to a sequence of any one of SEQ ID NOs: 1322-2632; c. nucleotide 1 through nucleotide 18 of a sequence that is at least 90% identical to a sequence of any one of SEQ ID NOs: 1322-2632; d. nucleotide 1 through nucleotide 19 of a sequence that is at least 90% identical to a sequence of any one of SEQ ID NOs: 1322-2632; e. nucleotide 1 through nucleotide 20 of a sequence that is at least 90% identical to a sequence of any one of SEQ ID NOs: 1322-2632; f. nucleotide 1 through nucleotide 21 of a sequence that is at least 90% identical to a sequence of any one of SEQ ID NOs: 1322-2632; g. nucleotide 1 through nucleotide 22 of a sequence that is at least 90% identical to a sequence of any one of SEQ ID NOs: 1322-2632; h. nucleotide 1 through nucleotide 23 of a sequence that is at least 90% identical to a sequence of any one of SEQ ID NOs: 1322-2632; i. nucleotide 1 through nucleotide 24 of a sequence that is at least 90% identical to a sequence of any one of SEQ ID NOs: 1322-2632; j. nucleotide 1 through nucleotide 25 of a sequence that is at least 90% identical to a sequence of any one of SEQ ID NOs: 1322-2632; k. nucleotide 1 through nucleotide 26 of a sequence that is at least 90% identical to a sequence of any one of SEQ ID NOs: 1322-2632; 1. nucleotide 1 through nucleotide 27 of a sequence that is at least 90% identical to a sequence of any one of SEQ ID NOs: 1322-2632; m. nucleotide 1 through nucleotide 28 of a sequence that is at least 90% identical to a sequence of any one of SEQ ID NOs: 1322-2632; n. nucleotide 1 through nucleotide 29 of a sequence that is at least 90% identical to a sequence of any one of SEQ ID NOs: 1322-1425 and 1427-2632; or o. nucleotide 1 through nucleotide 30 of a sequence that is at least 90% identical to a sequence of any one of SEQ ID NOs: 1322-1425 and 1427-2632.

[0031] In another aspect of the composition, the spacer sequence comprises: a. nucleotide 1 through nucleotide 16 of any one of SEQ ID NOs: 1322-2632; b. nucleotide 1 through nucleotide 17 of any one of SEQ ID NOs: 1322-2632; c. nucleotide 1 through nucleotide 18 of any one of SEQ ID NOs: 1322-2632; d. nucleotide 1 through nucleotide 19 of any one of SEQ ID NOs: 1322-2632; e. nucleotide 1 through nucleotide 20 of any one of SEQ ID NOs: 1322-2632; f. nucleotide 1 through nucleotide 21 of any one of SEQ ID NOs: 1322-2632; g. nucleotide 1 through nucleotide 22 of any one of SEQ ID NOs: 1322-2632; h. nucleotide 1 through nucleotide 23 of any one of SEQ ID NOs: 1322-2632; i. nucleotide 1 through nucleotide 24 of any one of SEQ ID NOs: 1322-2632; j. nucleotide 1 through nucleotide 25 of any one of SEQ ID NOs: 1322-2632; k. nucleotide 1 through nucleotide 26 of any one of SEQ ID NOs: 1322-2632; 1. nucleotide 1 through nucleotide 27 of any one of SEQ ID NOs: 1322-2632; m. nucleotide 1 through nucleotide 28 of any one of SEQ ID NOs: 1322-2632; n. nucleotide 1 through nucleotide 29 of any one of SEQ ID NOs: 1322-1425 and 1427-2632; or o. nucleotide 1 through nucleotide 30 of any one of SEQ ID NOs: 1322-1425 and 1427-2632.

[0032] In another aspect of the composition, the direct repeat comprises: a. nucleotide 1 through nucleotide 36 of a sequence that is at least 90% identical to a sequence of any one of SEQ ID NOs: 1-8; b. nucleotide 2 through nucleotide 36 of a sequence that is at least 90% identical to a sequence of any one of SEQ ID NOs: 1-8; c. nucleotide 3 through nucleotide 36 of a sequence that is at least 90% identical to a sequence of any one of SEQ ID NOs: 1-8; d. nucleotide 4 through nucleotide 36 of a sequence that is at least 90% identical to a sequence of any one of SEQ ID NOs: 1-8; e. nucleotide 5 through nucleotide 36 of a sequence that is at least 90% identical to a sequence of any one of SEQ ID NOs: 1-8; f. nucleotide 6 through nucleotide 36 of a sequence that is at least 90% identical to a sequence of any one of SEQ ID NOs: 1-8; g. nucleotide 7 through nucleotide 36 of a sequence that is at least 90% identical to a sequence of any one of SEQ ID NOs: 1-8; h. nucleotide 8 through nucleotide 36 of a sequence that is at least 90% identical to a sequence of any one of SEQ ID NOs: 1-8; i. nucleotide 9 through nucleotide 36 of a sequence that is at least 90% identical to a sequence of any one of SEQ ID NOs: 1-8; j. nucleotide 10 through nucleotide 36 of a sequence that is at least 90% identical to a sequence of any one of SEQ ID NOs: 1-8; k. nucleotide 11 through nucleotide 36 of a sequence that is at least 90% identical to a sequence of any one of SEQ ID NOs: 1-8; 1. nucleotide 12 through nucleotide 36 of a sequence that is at least 90% identical to a sequence of any one of SEQ ID NOs: 1-8; m. nucleotide 13 through nucleotide 36 of a sequence that is at least 90% identical to a sequence of any one of SEQ ID NOs: 1-8; n. nucleotide 14 through nucleotide 36 of a sequence that is at least 90% identical to a sequence of any one of SEQ ID NOs: 1-8; o. nucleotide 1 through nucleotide 34 of a sequence that is at least 90% identical to a sequence of SEQ ID NO: 9; p. nucleotide 2 through nucleotide 34 of a sequence that is at least 90% identical to a sequence of SEQ ID NO: 9; q. nucleotide 3 through nucleotide 34 of a sequence that is at least 90% identical to a sequence of SEQ ID NO: 9; r. nucleotide 4 through nucleotide 34 of a sequence that is at least 90% identical to a sequence of SEQ ID NO: 9; s. nucleotide 5 through nucleotide 34 of a sequence that is at least 90% identical to a sequence of SEQ ID NO: 9; t. nucleotide 6 through nucleotide 34 of a sequence that is at least 90% identical to a sequence of SEQ ID NO: 9; u. nucleotide 7 through nucleotide 34 of a sequence that is at least 90% identical to a sequence of SEQ ID NO: 9; v. nucleotide 8 through nucleotide 34 of a sequence that is at least 90% identical to a sequence of SEQ ID NO: 9; w. nucleotide 9 through nucleotide 34 of a sequence that is at least 90% identical to a sequence of SEQ ID NO: 9; x. nucleotide 10 through nucleotide 34 of a sequence that is at least 90% identical to a sequence of SEQ ID NO: 9; y. nucleotide 11 through nucleotide 34 of a sequence that is at least 90% identical to a sequence of SEQ ID NO: 9; z. nucleotide 12 through nucleotide 34 of a sequence that is at least 90% identical to a sequence of SEQ ID NO: 9; or aa. a sequence that is at least 90% identical to a sequence of SEQ ID NO: 10 or a portion thereof.

[0033] In another aspect of the composition, the direct repeat comprises: a. nucleotide 1 through nucleotide 36 of any one of SEQ ID NOs: 1-8; b. nucleotide 2 through nucleotide 36 of any one of SEQ ID NOs: 1-8; c. nucleotide 3 through nucleotide 36 of any one of SEQ ID NOs: 1-8; d. nucleotide 4 through nucleotide 36 of any one of SEQ ID NOs: 1-8; e. nucleotide 5 through nucleotide 36 of any one of SEQ ID NOs: 1-8; f. nucleotide 6 through nucleotide 36 of any one of SEQ ID NOs: 1-8; g. nucleotide 7 through nucleotide 36 of any one of SEQ ID NOs: 1-8; h. nucleotide 8 through nucleotide 36 of any one of SEQ ID NOs: 1-8; i. nucleotide 9 through nucleotide 36 of any one of SEQ ID NOs: 1-8; j. nucleotide 10 through nucleotide 36 of any one of SEQ ID NOs: 1-8; k. nucleotide 11 through nucleotide 36 of any one of SEQ ID NOs: 1-8; 1. nucleotide 12 through nucleotide 36 of any one of SEQ ID NOs: 1-8; m. nucleotide 13 through nucleotide 36 of any one of SEQ ID NOs: 1-8; n. nucleotide 14 through nucleotide 36 of any one of SEQ ID NOs: 1-8; o. nucleotide 1 through nucleotide 34 of SEQ ID NO: 9; p. nucleotide 2 through nucleotide 34 of SEQ ID NO: 9; q. nucleotide 3 through nucleotide 34 of SEQ ID NO: 9; r. nucleotide 4 through nucleotide 34 of SEQ ID NO: 9; s. nucleotide 5 through nucleotide 34 of SEQ ID NO: 9; t. nucleotide 6 through nucleotide 34 of SEQ ID NO: 9; u. nucleotide 7 through nucleotide 34 of SEQ ID NO: 9; v. nucleotide 8 through nucleotide 34 of SEQ ID NO: 9; w. nucleotide 9 through nucleotide 34 of SEQ ID NO: 9; x. nucleotide 10 through nucleotide 34 of SEQ ID NO: 9; y. nucleotide 11 through nucleotide 34 of SEQ ID NO: 9; z. nucleotide 12 through nucleotide 34 of SEQ ID NO: 9; or aa. SEQ ID NO: 10 or a portion thereof.

[0034] In another aspect of the composition, the direct repeat comprises: a. nucleotide 1 through nucleotide 36 of a sequence that is at least 90% identical to a sequence of any one of SEQ ID NOs: 2652-2669; b. nucleotide 2 through nucleotide 36 of a sequence that is at least 90% identical to a sequence of any one of SEQ ID NOs: 2652-2669; c. nucleotide 3 through nucleotide 36 of a sequence that is at least 90% identical to a sequence of any one of SEQ ID NOs: 2652-2669; d. nucleotide 4 through nucleotide 36 of a sequence that is at least 90% identical to a sequence of any one of SEQ ID NOs: 2652-2669; e. nucleotide 5 through nucleotide 36 of a sequence that is at least 90% identical to a sequence of any one of SEQ ID NOs: 2652-2669; f. nucleotide 6 through nucleotide 36 of a sequence that is at least 90% identical to a sequence of any one of SEQ ID NOs: 2652-2669; g. nucleotide 7 through nucleotide 36 of a sequence that is at least 90% identical to a sequence of any one of SEQ ID NOs: 2652-2669; h. nucleotide 8 through nucleotide 36 of a sequence that is at least 90% identical to a sequence of any one of SEQ ID NOs: 2652-2669; i. nucleotide 9 through nucleotide 36 of a sequence that is at least 90% identical to a sequence of any one of SEQ ID NOs: 2652-2669; j. nucleotide 10 through nucleotide 36 of a sequence that is at least 90% identical to a sequence of any one of SEQ ID NOs: 2652-2669; k. nucleotide 11 through nucleotide 36 of a sequence that is at least 90% identical to a sequence of any one of SEQ ID NOs: 2652-2669; 1. nucleotide 12 through nucleotide 36 of a sequence that is at least 90% identical to a sequence of any one of SEQ ID NOs: 2652-2669; m. nucleotide 13 through nucleotide 36 of a sequence that is at least 90% identical to a sequence of any one of SEQ ID NOs: 2652-2669; n. nucleotide 14 through nucleotide 36 of a sequence that is at least 90% identical to a sequence of any one of SEQ ID NOs: 2652-2669; or o. a sequence that is at least 90% identical to a sequence of SEQ ID NO: 2670 or a portion thereof.

[0035] In another aspect of the composition, the direct repeat comprises: a. nucleotide 1 through nucleotide 36 of any one of SEQ ID NOs: 2652-2669; b. nucleotide 2 through nucleotide 36 of any one of SEQ ID NOs: 2652-2669; c. nucleotide 3 through nucleotide 36 of any one of SEQ ID NOs: 2652-2669; d. nucleotide 4 through nucleotide 36 of any one of SEQ ID NOs: 2652-2669; e. nucleotide 5 through nucleotide 36 of any one of SEQ ID NOs: 2652-2669; f. nucleotide 6 through nucleotide 36 of any one of SEQ ID NOs: 2652-2669; g. nucleotide 7 through nucleotide 36 of any one of SEQ ID NOs: 2652-2669; h. nucleotide 8 through nucleotide 36 of any one of SEQ ID NOs: 2652-2669; i. nucleotide 9 through nucleotide 36 of any one of SEQ ID NOs: 2652-2669; j. nucleotide 10 through nucleotide 36 of any one of SEQ ID NOs: 2652-2669; k. nucleotide 11 through nucleotide 36 of any one of SEQ ID NOs: 2652-2669; 1. nucleotide 12 through nucleotide 36 of any one of SEQ ID NOs: 2652-2669; m. nucleotide 13 through nucleotide 36 of any one of SEQ ID NOs: 2652-2669; n. nucleotide 14 through nucleotide 36 of any one of SEQ ID NOs: 2652-2669; or o. SEQ ID NO: 2670 or a portion thereof.

[0036] In another aspect of the composition, the direct repeat comprises: a. nucleotide 1 through nucleotide 36 of a sequence that is at least 90% identical to SEQ ID NO: 2671; b. nucleotide 2 through nucleotide 36 of a sequence that is at least 90% identical to SEQ ID NO: 2671; c. nucleotide 3 through nucleotide 36 of a sequence that is at least 90% identical to SEQ ID NO: 2671; d. nucleotide 4 through nucleotide 36 of a sequence that is at least 90% identical to SEQ ID NO: 2671; e. nucleotide 5 through nucleotide 36 of a sequence that is at least 90% identical to SEQ ID NO: 2671; f. nucleotide 6 through nucleotide 36 of a sequence that is at least 90% identical to SEQ ID NO: 2671; g. nucleotide 7 through nucleotide 36 of a sequence that is at least 90% identical to SEQ ID NO: 2671; h. nucleotide 8 through nucleotide 36 of a sequence that is at least 90% identical to SEQ ID NO: 2671; i. nucleotide 9 through nucleotide 36 of a sequence that is at least 90% identical to SEQ ID NO: 2671; j. nucleotide 10 through nucleotide 36 of a sequence that is at least 90% identical to SEQ ID NO: 2671; k. nucleotide 11 through nucleotide 36 of a sequence that is at least 90% identical to SEQ ID NO: 2671; 1. nucleotide 12 through nucleotide 36 of a sequence that is at least 90% identical to SEQ ID NO: 2671; m. nucleotide 13 through nucleotide 36 of a sequence that is at least 90% identical to SEQ ID NO: 2671; n. nucleotide 14 through nucleotide 36 of a sequence that is at least 90% identical to SEQ ID NO: 2671; or o. a sequence that is at least 90% identical to a sequence of SEQ ID NO: 2672 or SEQ ID NO: 2673 or a portion thereof.

[0037] In another aspect of the composition, the direct repeat comprises: a. nucleotide 1 through nucleotide 36 of SEQ ID NO: 2671; b. nucleotide 2 through nucleotide 36 of SEQ ID NO: 2671; c. nucleotide 3 through nucleotide 36 of SEQ ID NO: 2671; d. nucleotide 4 through nucleotide 36 of SEQ ID NO: 2671; e. nucleotide 5 through nucleotide 36 of SEQ ID NO: 2671; f. nucleotide 6 through nucleotide 36 of SEQ ID NO: 2671; g. nucleotide 7 through nucleotide 36 of SEQ ID NO: 2671; h. nucleotide 8 through nucleotide 36 of SEQ ID NO: 2671; i. nucleotide 9 through nucleotide 36 of SEQ ID NO: 2671; j. nucleotide 10 through nucleotide 36 of SEQ ID NO: 2671; k. nucleotide 11 through nucleotide 36 of SEQ ID NO: 2671; 1. nucleotide 12 through nucleotide 36 of SEQ ID NO: 2671; m. nucleotide 13 through nucleotide 36 of SEQ ID NO: 2671; n. nucleotide 14 through nucleotide 36 of SEQ ID NO: 2671; or o. SEQ ID NO: 2672 or SEQ ID NO: 2673 or a portion thereof.

[0038] In another aspect of the composition, the direct repeat comprises: a. nucleotide 1 through nucleotide 36 of a sequence that is at least 90% identical to a sequence of SEQ ID NO: 2674 or SEQ ID NO: 2675; b. nucleotide 2 through nucleotide 36 of a sequence that is at least 90% identical to a sequence of SEQ ID NO: 2674 or SEQ ID NO: 2675; c. nucleotide 3 through nucleotide 36 of a sequence that is at least 90% identical to a sequence of SEQ ID NO: 2674 or SEQ ID NO: 2675; d. nucleotide 4 through nucleotide 36 of a sequence that is at least 90% identical to a sequence of SEQ ID NO: 2674 or SEQ ID NO: 2675; e. nucleotide 5 through nucleotide 36 of a sequence that is at least 90% identical to a sequence of SEQ ID NO: 2674 or SEQ ID NO: 2675; f. nucleotide 6 through nucleotide 36 of a sequence that is at least 90% identical to a sequence of SEQ ID NO: 2674 or SEQ ID NO: 2675; g. nucleotide 7 through nucleotide 36 of a sequence that is at least 90% identical to a sequence of SEQ ID NO: 2674 or SEQ ID NO: 2675; h. nucleotide 8 through nucleotide 36 of a sequence that is at least 90% identical to a sequence of SEQ ID NO: 2674 or SEQ ID NO: 2675; i. nucleotide 9 through nucleotide 36 of a sequence that is at least 90% identical to a sequence of SEQ ID NO: 2674 or SEQ ID NO: 2675; j. nucleotide 10 through nucleotide 36 of a sequence that is at least 90% identical to a sequence of SEQ ID NO: 2674 or SEQ ID NO: 2675; k. nucleotide 11 through nucleotide 36 of a sequence that is at least 90% identical to a sequence of SEQ ID NO: 2674 or SEQ ID NO: 2675; 1. nucleotide 12 through nucleotide 36 of a sequence that is at least 90% identical to a sequence of SEQ ID NO: 2674 or SEQ ID NO: 2675; m. nucleotide 13 through nucleotide 36 of a sequence that is at least 90% identical to a sequence of SEQ ID NO: 2674 or SEQ ID NO: 2675; n. nucleotide 14 through nucleotide 36 of a sequence that is at least 90% identical to a sequence of SEQ ID NO: 2674 or SEQ ID NO: 2675; o. nucleotide 15 through nucleotide 36 of a sequence that is at least 90% identical to a sequence of SEQ ID NO: 2674 or SEQ ID NO: 2675; or p. a sequence that is at least 90% identical to a sequence of SEQ ID NO: 2676 or a portion thereof.

[0039] In another aspect of the composition, the direct repeat comprises: a. nucleotide 1 through nucleotide 36 of SEQ ID NO: 2674 or SEQ ID NO: 2675; b. nucleotide 2 through nucleotide 36 of SEQ ID NO: 2674 or SEQ ID NO: 2675; c. nucleotide 3 through nucleotide 36 of SEQ ID NO: 2674 or SEQ ID NO: 2675; d. nucleotide 4 through nucleotide 36 of SEQ ID NO: 2674 or SEQ ID NO: 2675; e. nucleotide 5 through nucleotide 36 of SEQ ID NO: 2674 or SEQ ID NO: 2675; f. nucleotide 6 through nucleotide 36 of SEQ ID NO: 2674 or SEQ ID NO: 2675; g. nucleotide 7 through nucleotide 36 of SEQ ID NO: 2674 or SEQ ID NO: 2675; h. nucleotide 8 through nucleotide 36 of SEQ ID NO: 2674 or SEQ ID NO: 2675; i. nucleotide 9 through nucleotide 36 of SEQ ID NO: 2674 or SEQ ID NO: 2675; j. nucleotide 10 through nucleotide 36 of SEQ ID NO: 2674 or SEQ ID NO: 2675; k. nucleotide 11 through nucleotide 36 of SEQ ID NO: 2674 or SEQ ID NO: 2675; 1. nucleotide 12 through nucleotide 36 of SEQ ID NO: 2674 or SEQ ID NO: 2675; m. nucleotide 13 through nucleotide 36 of SEQ ID NO: 2674 or SEQ ID NO: 2675; n. nucleotide 14 through nucleotide 36 of SEQ ID NO: 2674 or SEQ ID NO: 2675; o. nucleotide 15 through nucleotide 36 of SEQ ID NO: 2674 or SEQ ID NO: 2675; or p. SEQ ID NO: 2676 or a portion thereof.

[0040] In another aspect of the composition, the spacer sequence is substantially complementary to the complement of a sequence of any one of SEQ ID NOs: 11-1321.

[0041] In another aspect of the composition, the target sequence is adjacent to a protospacer adjacent motif (PAM) comprising the sequence 5′-NTTN-3′.

[0042] In another aspect of the composition, the PAM comprises the sequence 5′-ATTA-3′, 5′-ATTT-3′, 5′-ATTG-3′, 5′-ATTC-3′, 5′-TTTA-3′, 5′-TTTT-3′, 5′-TTTG-3′, 5′-TTTC-3′, 5′-GTTA-3′, 5′-GTTT-3′, 5′-GTTG-3′, 5′-GTTC-3′, 5′-CTTA-3′, 5′-CTTT-3′, 5′-CTTG-3′, or 5′-CTTC-3′.

[0043] In another aspect of the composition, the target sequence is immediately adjacent to the PAM sequence.

[0044] In another aspect of the composition, the target sequence is within 1, 2, 3, 4, or 5 nucleotides of the PAM sequence.

[0045] In another aspect of the composition, the Cas12i polypeptide is: a. a Cas12i2 polypeptide comprising a sequence that is at least 90% identical to the sequence of SEQ ID NO: 2634, SEQ ID NO: 2641, SEQ ID NO: 2642, SEQ ID NO: 2643, SEQ ID NO: 2644, or SEQ ID NO: 2645; b. a Cas12i4 polypeptide comprising a sequence that is at least 90% identical to the sequence of SEQ ID NO: 2647, SEQ ID NO: 2648, or SEQ ID NO: 2649; c. a Cas12i1 polypeptide comprising a sequence that is at least 90% identical to the sequence of SEQ ID NO: 2650; or d. a Cas12i3 polypeptide comprising a sequence that is at least 90% identical to the sequence of SEQ ID NO: 2651.

[0046] In another aspect of the composition, the Cas12i polypeptide is: a. a Cas12i2 polypeptide comprising a sequence of SEQ ID NO: 2634, SEQ ID NO: 2641, SEQ ID NO: 2642, SEQ ID NO: 2643, SEQ ID NO: 2644, or SEQ ID NO: 2645; b. a Cas12i4 polypeptide comprising a sequence of SEQ ID NO: 2647, SEQ ID NO: 2648, or SEQ ID NO: 2649; c. a Cas12i1 polypeptide comprising a sequence of SEQ ID NO: 2650; or d. a Cas12i3 polypeptide comprising a sequence of SEQ ID NO: 2651.

[0047] In another aspect of the composition, the RNA guide and the Cas12i polypeptide form a ribonucleoprotein complex.

[0048] In another aspect of the composition, the ribonucleoprotein complex binds a target nucleic acid.

[0049] In another aspect of the composition, the composition is present within a cell.

[0050] In another aspect of the composition, the RNA guide and the Cas12i polypeptide are encoded in a vector, e.g., expression vector. In another aspect of the composition, the RNA guide and the Cas12i polypeptide are encoded in a single vector or the RNA guide is encoded in a first vector and the Cas12i polypeptide is encoded in a second vector.

[0051] The invention further provides a vector system comprising one or more vectors encoding an RNA guide disclosed herein and a Cas12i polypeptide. In an embodiment, the vector system comprises a first vector encoding an RNA guide disclosed herein and a second vector encoding a Cas12i polypeptide. The vectors may be expression vectors.

[0052] The invention yet further provides an RNA guide comprising (i) a spacer sequence that is substantially complementary to a target sequence within a BCL11A gene and (ii) a direct repeat sequence.

[0053] In one aspect of the RNA guide, the target sequence is within exon 1, exon 2, exon 3, exon 4, or the enhancer region of the BCL11A gene.

[0054] In another aspect of the RNA guide, the BCL11A gene comprises the sequence of SEQ ID NO: 2635, the reverse complement of SEQ ID NO: 2635, a variant of SEQ ID NO: 2635, or the reverse complement of a variant of SEQ ID NO: 2635.

[0055] In another aspect of the RNA guide, the spacer sequence comprises: a. nucleotide 1 through nucleotide 16 of a sequence that is at least 90% identical to a sequence of any one of SEQ ID NOs: 1322-2632; b. nucleotide 1 through nucleotide 17 of a sequence that is at least 90% identical to a sequence of any one of SEQ ID NOs: 1322-2632; c. nucleotide 1 through nucleotide 18 of a sequence that is at least 90% identical to a sequence of any one of SEQ ID NOs: 1322-2632; d. nucleotide 1 through nucleotide 19 of a sequence that is at least 90% identical to a sequence of any one of SEQ ID NOs: 1322-2632; e. nucleotide 1 through nucleotide 20 of a sequence that is at least 90% identical to a sequence of any one of SEQ ID NOs: 1322-2632; f. nucleotide 1 through nucleotide 21 of a sequence that is at least 90% identical to a sequence of any one of SEQ ID NOs: 1322-2632; g. nucleotide 1 through nucleotide 22 of a sequence that is at least 90% identical to a sequence of any one of SEQ ID NOs: 1322-2632; h. nucleotide 1 through nucleotide 23 of a sequence that is at least 90% identical to a sequence of any one of SEQ ID NOs: 1322-2632; i. nucleotide 1 through nucleotide 24 of a sequence that is at least 90% identical to a sequence of any one of SEQ ID NOs: 1322-2632; j. nucleotide 1 through nucleotide 25 of a sequence that is at least 90% identical to a sequence of any one of SEQ ID NOs: 1322-2632; k. nucleotide 1 through nucleotide 26 of a sequence that is at least 90% identical to a sequence of any one of SEQ ID NOs: 1322-2632; 1. nucleotide 1 through nucleotide 27 of a sequence that is at least 90% identical to a sequence of any one of SEQ ID NOs: 1322-2632; m. nucleotide 1 through nucleotide 28 of a sequence that is at least 90% identical to a sequence of any one of SEQ ID NOs: 1322-2632; n. nucleotide 1 through nucleotide 29 of a sequence that is at least 90% identical to a sequence of any one of SEQ ID NOs: 1322-1425 and 1427-2632; or o. nucleotide 1 through nucleotide 30 of a sequence that is at least 90% identical to a sequence of any one of SEQ ID NOs: 1322-1425 and 1427-2632.

[0056] In another aspect of the composition, the spacer sequence comprises: a. nucleotide 1 through nucleotide 16 of any one of SEQ ID NOs: 1322-2632; b. nucleotide 1 through nucleotide 17 of any one of SEQ ID NOs: 1322-2632; c. nucleotide 1 through nucleotide 18 of any one of SEQ ID NOs: 1322-2632; d. nucleotide 1 through nucleotide 19 of any one of SEQ ID NOs: 1322-2632; e. nucleotide 1 through nucleotide 20 of any one of SEQ ID NOs: 1322-2632; f. nucleotide 1 through nucleotide 21 of any one of SEQ ID NOs: 1322-2632; g. nucleotide 1 through nucleotide 22 of any one of SEQ ID NOs: 1322-2632; h. nucleotide 1 through nucleotide 23 of any one of SEQ ID NOs: 1322-2632; i. nucleotide 1 through nucleotide 24 of any one of SEQ ID NOs: 1322-2632; j. nucleotide 1 through nucleotide 25 of any one of SEQ ID NOs: 1322-2632; k. nucleotide 1 through nucleotide 26 of any one of SEQ ID NOs: 1322-2632; 1. nucleotide 1 through nucleotide 27 of any one of SEQ ID NOs: 1322-2632; m. nucleotide 1 through nucleotide 28 of any one of SEQ ID NOs: 1322-2632; n. nucleotide 1 through nucleotide 29 of any one of SEQ ID NOs: 1322-1425 and 1427-2632; or o. nucleotide 1 through nucleotide 30 of any one of SEQ ID NOs: 1322-1425 and 1427-2632.

[0057] In another aspect of the RNA guide, the direct repeat comprises: a. nucleotide 1 through nucleotide 36 of a sequence that is at least 90% identical to a sequence of any one of SEQ ID NOs: 1-8; b. nucleotide 2 through nucleotide 36 of a sequence that is at least 90% identical to a sequence of any one of SEQ ID NOs: 1-8; c. nucleotide 3 through nucleotide 36 of a sequence that is at least 90% identical to a sequence of any one of SEQ ID NOs: 1-8; d. nucleotide 4 through nucleotide 36 of a sequence that is at least 90% identical to a sequence of any one of SEQ ID NOs: 1-8; e. nucleotide 5 through nucleotide 36 of a sequence that is at least 90% identical to a sequence of any one of SEQ ID NOs: 1-8; f. nucleotide 6 through nucleotide 36 of a sequence that is at least 90% identical to a sequence of any one of SEQ ID NOs: 1-8; g. nucleotide 7 through nucleotide 36 of a sequence that is at least 90% identical to a sequence of any one of SEQ ID NOs: 1-8; h. nucleotide 8 through nucleotide 36 of a sequence that is at least 90% identical to a sequence of any one of SEQ ID NOs: 1-8; i. nucleotide 9 through nucleotide 36 of a sequence that is at least 90% identical to a sequence of any one of SEQ ID NOs: 1-8; j. nucleotide 10 through nucleotide 36 of a sequence that is at least 90% identical to a sequence of any one of SEQ ID NOs: 1-8; k. nucleotide 11 through nucleotide 36 of a sequence that is at least 90% identical to a sequence of any one of SEQ ID NOs: 1-8; 1. nucleotide 12 through nucleotide 36 of a sequence that is at least 90% identical to a sequence of any one of SEQ ID NOs: 1-8; m. nucleotide 13 through nucleotide 36 of a sequence that is at least 90% identical to a sequence of any one of SEQ ID NOs: 1-8; n. nucleotide 14 through nucleotide 36 of a sequence that is at least 90% identical to a sequence of any one of SEQ ID NOs: 1-8; o. nucleotide 1 through nucleotide 34 of a sequence that is at least 90% identical to a sequence of SEQ ID NO: 9; p. nucleotide 2 through nucleotide 34 of a sequence that is at least 90% identical to a sequence of SEQ ID NO: 9; q. nucleotide 3 through nucleotide 34 of a sequence that is at least 90% identical to a sequence of SEQ ID NO: 9; r. nucleotide 4 through nucleotide 34 of a sequence that is at least 90% identical to a sequence of SEQ ID NO: 9; s. nucleotide 5 through nucleotide 34 of a sequence that is at least 90% identical to a sequence of SEQ ID NO: 9; t. nucleotide 6 through nucleotide 34 of a sequence that is at least 90% identical to a sequence of SEQ ID NO: 9; u. nucleotide 7 through nucleotide 34 of a sequence that is at least 90% identical to a sequence of SEQ ID NO: 9; v. nucleotide 8 through nucleotide 34 of a sequence that is at least 90% identical to a sequence of SEQ ID NO: 9; w. nucleotide 9 through nucleotide 34 of a sequence that is at least 90% identical to a sequence of SEQ ID NO: 9; x. nucleotide 10 through nucleotide 34 of a sequence that is at least 90% identical to a sequence of SEQ ID NO: 9; y. nucleotide 11 through nucleotide 34 of a sequence that is at least 90% identical to a sequence of SEQ ID NO: 9; z. nucleotide 12 through nucleotide 34 of a sequence that is at least 90% identical to a sequence of SEQ ID NO: 9; or aa. a sequence that is at least 90% identical to a sequence of SEQ ID NO: 10 or a portion thereof.

[0058] In another aspect of the RNA guide, the direct repeat comprises: a. nucleotide 1 through nucleotide 36 of any one of SEQ ID NOs: 1-8; b. nucleotide 2 through nucleotide 36 of any one of SEQ ID NOs: 1-8; c. nucleotide 3 through nucleotide 36 of any one of SEQ ID NOs: 1-8; d. nucleotide 4 through nucleotide 36 of any one of SEQ ID NOs: 1-8; e. nucleotide 5 through nucleotide 36 of any one of SEQ ID NOs: 1-8; f. nucleotide 6 through nucleotide 36 of any one of SEQ ID NOs: 1-8; g. nucleotide 7 through nucleotide 36 of any one of SEQ ID NOs: 1-8; h. nucleotide 8 through nucleotide 36 of any one of SEQ ID NOs: 1-8; i. nucleotide 9 through nucleotide 36 of any one of SEQ ID NOs: 1-8; j. nucleotide 10 through nucleotide 36 of any one of SEQ ID NOs: 1-8; k. nucleotide 11 through nucleotide 36 of any one of SEQ ID NOs: 1-8; 1. nucleotide 12 through nucleotide 36 of any one of SEQ ID NOs: 1-8; m. nucleotide 13 through nucleotide 36 of any one of SEQ ID NOs: 1-8; n. nucleotide 14 through nucleotide 36 of any one of SEQ ID NOs: 1-8; o. nucleotide 1 through nucleotide 34 of SEQ ID NO: 9; p. nucleotide 2 through nucleotide 34 of SEQ ID NO: 9; q. nucleotide 3 through nucleotide 34 of SEQ ID NO: 9; r. nucleotide 4 through nucleotide 34 of SEQ ID NO: 9; s. nucleotide 5 through nucleotide 34 of SEQ ID NO: 9; t. nucleotide 6 through nucleotide 34 of SEQ ID NO: 9; u. nucleotide 7 through nucleotide 34 of SEQ ID NO: 9; v. nucleotide 8 through nucleotide 34 of SEQ ID NO: 9; w. nucleotide 9 through nucleotide 34 of SEQ ID NO: 9; x. nucleotide 10 through nucleotide 34 of SEQ ID NO: 9; y. nucleotide 11 through nucleotide 34 of SEQ ID NO: 9; z. nucleotide 12 through nucleotide 34 of SEQ ID NO: 9; or aa. SEQ ID NO: 10 or a portion thereof.

[0059] In another aspect of the RNA guide, the direct repeat comprises: a. nucleotide 1 through nucleotide 36 of a sequence that is at least 90% identical to a sequence of any one of SEQ ID NOs: 2652-2669; b. nucleotide 2 through nucleotide 36 of a sequence that is at least 90% identical to a sequence of any one of SEQ ID NOs: 2652-2669; c. nucleotide 3 through nucleotide 36 of a sequence that is at least 90% identical to a sequence of any one of SEQ ID NOs: 2652-2669; d. nucleotide 4 through nucleotide 36 of a sequence that is at least 90% identical to a sequence of any one of SEQ ID NOs: 2652-2669; e. nucleotide 5 through nucleotide 36 of a sequence that is at least 90% identical to a sequence of any one of SEQ ID NOs: 2652-2669; f. nucleotide 6 through nucleotide 36 of a sequence that is at least 90% identical to a sequence of any one of SEQ ID NOs: 2652-2669; g. nucleotide 7 through nucleotide 36 of a sequence that is at least 90% identical to a sequence of any one of SEQ ID NOs: 2652-2669; h. nucleotide 8 through nucleotide 36 of a sequence that is at least 90% identical to a sequence of any one of SEQ ID NOs: 2652-2669; i. nucleotide 9 through nucleotide 36 of a sequence that is at least 90% identical to a sequence of any one of SEQ ID NOs: 2652-2669; j. nucleotide 10 through nucleotide 36 of a sequence that is at least 90% identical to a sequence of any one of SEQ ID NOs: 2652-2669; k. nucleotide 11 through nucleotide 36 of a sequence that is at least 90% identical to a sequence of any one of SEQ ID NOs: 2652-2669; 1. nucleotide 12 through nucleotide 36 of a sequence that is at least 90% identical to a sequence of any one of SEQ ID NOs: 2652-2669; m. nucleotide 13 through nucleotide 36 of a sequence that is at least 90% identical to a sequence of any one of SEQ ID NOs: 2652-2669; n. nucleotide 14 through nucleotide 36 of a sequence that is at least 90% identical to a sequence of any one of SEQ ID NOs: 2652-2669; or o. a sequence that is at least 90% identical to a sequence of SEQ ID NO: 2670 or a portion thereof.

[0060] In another aspect of the RNA guide, the direct repeat comprises: a. nucleotide 1 through nucleotide 36 of any one of SEQ ID NOs: 2652-2669; b. nucleotide 2 through nucleotide 36 of any one of SEQ ID NOs: 2652-2669; c. nucleotide 3 through nucleotide 36 of any one of SEQ ID NOs: 2652-2669; d. nucleotide 4 through nucleotide 36 of any one of SEQ ID NOs: 2652-2669; e. nucleotide 5 through nucleotide 36 of any one of SEQ ID NOs: 2652-2669; f. nucleotide 6 through nucleotide 36 of any one of SEQ ID NOs: 2652-2669; g. nucleotide 7 through nucleotide 36 of any one of SEQ ID NOs: 2652-2669; h. nucleotide 8 through nucleotide 36 of any one of SEQ ID NOs: 2652-2669; i. nucleotide 9 through nucleotide 36 of any one of SEQ ID NOs: 2652-2669; j. nucleotide 10 through nucleotide 36 of any one of SEQ ID NOs: 2652-2669; k. nucleotide 11 through nucleotide 36 of any one of SEQ ID NOs: 2652-2669; 1. nucleotide 12 through nucleotide 36 of any one of SEQ ID NOs: 2652-2669; m. nucleotide 13 through nucleotide 36 of any one of SEQ ID NOs: 2652-2669; n. nucleotide 14 through nucleotide 36 of any one of SEQ ID NOs: 2652-2669; or o. SEQ ID NO: 2670 or a portion thereof.

[0061] In another aspect of the RNA guide, the direct repeat comprises: a. nucleotide 1 through nucleotide 36 of a sequence that is at least 90% identical to SEQ ID NO: 2671; b. nucleotide 2 through nucleotide 36 of a sequence that is at least 90% identical to SEQ ID NO: 2671; c. nucleotide 3 through nucleotide 36 of a sequence that is at least 90% identical to SEQ ID NO: 2671; d. nucleotide 4 through nucleotide 36 of a sequence that is at least 90% identical to SEQ ID NO: 2671; e. nucleotide 5 through nucleotide 36 of a sequence that is at least 90% identical to SEQ ID NO: 2671; f. nucleotide 6 through nucleotide 36 of a sequence that is at least 90% identical to SEQ ID NO: 2671; g. nucleotide 7 through nucleotide 36 of a sequence that is at least 90% identical to SEQ ID NO: 2671; h. nucleotide 8 through nucleotide 36 of a sequence that is at least 90% identical to SEQ ID NO: 2671; i. nucleotide 9 through nucleotide 36 of a sequence that is at least 90% identical to SEQ ID NO: 2671; j. nucleotide 10 through nucleotide 36 of a sequence that is at least 90% identical to SEQ ID NO: 2671; k. nucleotide 11 through nucleotide 36 of a sequence that is at least 90% identical to SEQ ID NO: 2671; 1. nucleotide 12 through nucleotide 36 of a sequence that is at least 90% identical to SEQ ID NO: 2671; m. nucleotide 13 through nucleotide 36 of a sequence that is at least 90% identical to SEQ ID NO: 2671; n. nucleotide 14 through nucleotide 36 of a sequence that is at least 90% identical to SEQ ID NO: 2671; or o. a sequence that is at least 90% identical to a sequence of SEQ ID NO: 2672 or SEQ ID NO: 2673 or a portion thereof.

[0062] In another aspect of the RNA guide, the direct repeat comprises: a. nucleotide 1 through nucleotide 36 of SEQ ID NO: 2671; b. nucleotide 2 through nucleotide 36 of SEQ ID NO: 2671; c. nucleotide 3 through nucleotide 36 of SEQ ID NO: 2671; d. nucleotide 4 through nucleotide 36 of SEQ ID NO: 2671; e. nucleotide 5 through nucleotide 36 of SEQ ID NO: 2671; f. nucleotide 6 through nucleotide 36 of SEQ ID NO: 2671; g. nucleotide 7 through nucleotide 36 of SEQ ID NO: 2671; h. nucleotide 8 through nucleotide 36 of SEQ ID NO: 2671; i. nucleotide 9 through nucleotide 36 of SEQ ID NO: 2671; j. nucleotide 10 through nucleotide 36 of SEQ ID NO: 2671; k. nucleotide 11 through nucleotide 36 of SEQ ID NO: 2671; 1. nucleotide 12 through nucleotide 36 of SEQ ID NO: 2671; m. nucleotide 13 through nucleotide 36 of SEQ ID NO: 2671; n. nucleotide 14 through nucleotide 36 of SEQ ID NO: 2671; or o. SEQ ID NO: 2672 or SEQ ID NO: 2673 or a portion thereof.

[0063] In another aspect of the RNA guide, the direct repeat comprises: a. nucleotide 1 through nucleotide 36 of a sequence that is at least 90% identical to a sequence of SEQ ID NO: 2674 or SEQ ID NO: 2675; b. nucleotide 2 through nucleotide 36 of a sequence that is at least 90% identical to a sequence of SEQ ID NO: 2674 or SEQ ID NO: 2675; c. nucleotide 3 through nucleotide 36 of a sequence that is at least 90% identical to a sequence of SEQ ID NO: 2674 or SEQ ID NO: 2675; d. nucleotide 4 through nucleotide 36 of a sequence that is at least 90% identical to a sequence of SEQ ID NO: 2674 or SEQ ID NO: 2675; e. nucleotide 5 through nucleotide 36 of a sequence that is at least 90% identical to a sequence of SEQ ID NO: 2674 or SEQ ID NO: 2675; f. nucleotide 6 through nucleotide 36 of a sequence that is at least 90% identical to a sequence of SEQ ID NO: 2674 or SEQ ID NO: 2675; g. nucleotide 7 through nucleotide 36 of a sequence that is at least 90% identical to a sequence of SEQ ID NO: 2674 or SEQ ID NO: 2675; h. nucleotide 8 through nucleotide 36 of a sequence that is at least 90% identical to a sequence of SEQ ID NO: 2674 or SEQ ID NO: 2675; i. nucleotide 9 through nucleotide 36 of a sequence that is at least 90% identical to a sequence of SEQ ID NO: 2674 or SEQ ID NO: 2675; j. nucleotide 10 through nucleotide 36 of a sequence that is at least 90% identical to a sequence of SEQ ID NO: 2674 or SEQ ID NO: 2675; k. nucleotide 11 through nucleotide 36 of a sequence that is at least 90% identical to a sequence of SEQ ID NO: 2674 or SEQ ID NO: 2675; 1. nucleotide 12 through nucleotide 36 of a sequence that is at least 90% identical to a sequence of SEQ ID NO: 2674 or SEQ ID NO: 2675; m. nucleotide 13 through nucleotide 36 of a sequence that is at least 90% identical to a sequence of SEQ ID NO: 2674 or SEQ ID NO: 2675; n. nucleotide 14 through nucleotide 36 of a sequence that is at least 90% identical to a sequence of SEQ ID NO: 2674 or SEQ ID NO: 2675; o. nucleotide 15 through nucleotide 36 of a sequence that is at least 90% identical to a sequence of SEQ ID NO: 2674 or SEQ ID NO: 2675; or p. a sequence that is at least 90% identical to a sequence of SEQ ID NO: 2676 or a portion thereof.

[0064] In another aspect of the RNA guide, the direct repeat comprises: a. nucleotide 1 through nucleotide 36 of SEQ ID NO: 2674 or SEQ ID NO: 2675; b. nucleotide 2 through nucleotide 36 of SEQ ID NO: 2674 or SEQ ID NO: 2675; c. nucleotide 3 through nucleotide 36 of SEQ ID NO: 2674 or SEQ ID NO: 2675; d. nucleotide 4 through nucleotide 36 of SEQ ID NO: 2674 or SEQ ID NO: 2675; e. nucleotide 5 through nucleotide 36 of SEQ ID NO: 2674 or SEQ ID NO: 2675; f. nucleotide 6 through nucleotide 36 of SEQ ID NO: 2674 or SEQ ID NO: 2675; g. nucleotide 7 through nucleotide 36 of SEQ ID NO: 2674 or SEQ ID NO: 2675; h. nucleotide 8 through nucleotide 36 of SEQ ID NO: 2674 or SEQ ID NO: 2675; i. nucleotide 9 through nucleotide 36 of SEQ ID NO: 2674 or SEQ ID NO: 2675; j. nucleotide 10 through nucleotide 36 of SEQ ID NO: 2674 or SEQ ID NO: 2675; k. nucleotide 11 through nucleotide 36 of SEQ ID NO: 2674 or SEQ ID NO: 2675; 1. nucleotide 12 through nucleotide 36 of SEQ ID NO: 2674 or SEQ ID NO: 2675; m. nucleotide 13 through nucleotide 36 of SEQ ID NO: 2674 or SEQ ID NO: 2675; n. nucleotide 14 through nucleotide 36 of SEQ ID NO: 2674 or SEQ ID NO: 2675; o. nucleotide 15 through nucleotide 36 of SEQ ID NO: 2674 or SEQ ID NO: 2675; or p. SEQ ID NO: 2676 or a portion thereof.

[0065] In another aspect of the RNA guide, the spacer sequence is substantially complementary to the complement of a sequence of any one of SEQ ID NOs: 11-1321.

[0066] In another aspect of the RNA guide, the target sequence is adjacent to a protospacer adjacent motif (PAM) comprising the sequence 5′-NTTN-3′, wherein N is any nucleotide.

[0067] In another aspect of the RNA guide, the PAM comprises the sequence 5′-ATTA-3′, 5′-ATTT-3′, 5′-ATTG-3′, 5′-ATTC-3′, 5′-TTTA-3′, 5′-TTTT-3′, 5′-TTTG-3′, 5′-TTTC-3′, 5′-GTTA-3′, 5′-GTTT-3′, 5′-GTTG-3′, 5′-GTTC-3′, 5′-CTTA-3′, 5′-CTTT-3′, 5′-CTTG-3′, or 5′-CTTC-3′.

[0068] In another aspect of the RNA guide, the target sequence is immediately adjacent to the PAM sequence.

[0069] In another aspect of the RNA guide, the target sequence is within 1, 2, 3, 4, or 5 nucleotides of the PAM sequence.

[0070] The invention yet further provides a nucleic acid encoding an RNA guide as described herein.

[0071] The invention yet further provides a vector comprising such an RNA guide as described herein.

[0072] The invention yet further provides a cell comprising a composition, an RNA guide, a nucleic acid, or a vector as described herein.

[0073] In one aspect of the cell, the cell is a eukaryotic cell, an animal cell, a mammalian cell, a human cell, a primary cell, a cell line, a stem cell, or a T cell.

[0074] The invention yet further provides a kit comprising a composition, an RNA guide, a nucleic acid, or a vector as described herein.

[0075] The invention yet further provides a method of editing a BCL11A sequence, the method comprising contacting a BCL11A sequence with a composition or an RNA guide as described herein. In an embodiment, the method is carried out in vitro. In an embodiment, the method is carried out ex vivo.

[0076] In one aspect of the method, the BCL11A sequence is in a cell.

[0077] In one aspect of the method, the composition or the RNA guide induces a deletion in the BCL11A sequence.

[0078] In one aspect of the method, the deletion is adjacent to a 5′-NTTN-3′ sequence, wherein N is any nucleotide.

[0079] In one aspect of the method, the deletion is downstream of the 5′-NTTN-3′ sequence.

[0080] In one aspect of the method, the deletion is up to about 40 nucleotides in length.

[0081] In one aspect of the method, the deletion is from about 4 nucleotides to 40 nucleotides in length.

[0082] In one aspect of the method, the deletion is from about 4 nucleotides to 25 nucleotides in length.

[0083] In one aspect of the method, the deletion is from about 10 nucleotides to 25 nucleotides in length.

[0084] In one aspect of the method, the deletion is from about 10 nucleotides to 15 nucleotides in length.

[0085] In one aspect of the method, the deletion starts within about 5 nucleotides to about 15 nucleotides of the 5′-NTTN-3′ sequence.

[0086] In one aspect of the method, the deletion starts within about 5 nucleotides to about 10 nucleotides of the 5′-NTTN-3′ sequence.

[0087] In one aspect of the method, the deletion starts within about 10 nucleotides to about 15 nucleotides of the 5′-NTTN-3′ sequence.

[0088] In one aspect of the method, the deletion starts within about 5 nucleotides to about 15 nucleotides downstream of the 5′-NTTN-3′ sequence.

[0089] In one aspect of the method, the deletion starts within about 5 nucleotides to about 10 nucleotides downstream of the 5′-NTTN-3′ sequence.

[0090] In one aspect of the method, the deletion starts within about 10 nucleotides to about 15 nucleotides downstream of the 5′-NTTN-3′ sequence.

[0091] In one aspect of the method, the deletion ends within about 20 nucleotides to about 30 nucleotides of the 5′-NTTN-3′ sequence.

[0092] In one aspect of the method, the deletion ends within about 20 nucleotides to about 25 nucleotides of the 5′-NTTN-3′ sequence.

[0093] In one aspect of the method, the deletion ends within about 25 nucleotides to about 30 nucleotides of the 5′-NTTN-3′ sequence.

[0094] In one aspect of the method, the deletion ends within about 20 nucleotides to about 30 nucleotides downstream of the 5′-NTTN-3′ sequence.

[0095] In one aspect of the method, the deletion ends within about 20 nucleotides to about 25 nucleotides downstream of the 5′-NTTN-3′ sequence.

[0096] In one aspect of the method, the deletion ends within about 25 nucleotides to about 30 nucleotides downstream of the 5′-NTTN-3′ sequence.

[0097] In one aspect of the method, the deletion starts within about 5 nucleotides to about 15 nucleotides downstream of the 5′-NTTN-3′ sequence and ends within about 20 nucleotides to about 30 nucleotides downstream of the 5′-NTTN-3′ sequence.

[0098] In one aspect of the method, the deletion starts within about 5 nucleotides to about 15 nucleotides downstream of the 5′-NTTN-3′ sequence and ends within about 20 nucleotides to about 25 nucleotides downstream of the 5′-NTTN-3′ sequence.

[0099] In one aspect of the method, the deletion starts within about 5 nucleotides to about 15 nucleotides downstream of the 5′-NTTN-3′ sequence and ends within about 25 nucleotides to about 30 nucleotides downstream of the 5′-NTTN-3′ sequence.

[0100] In one aspect of the method, the deletion starts within about 5 nucleotides to about 10 nucleotides downstream of the 5′-NTTN-3′ sequence and ends within about 20 nucleotides to about 30 nucleotides downstream of the 5′-NTTN-3′ sequence.

[0101] In one aspect of the method, the deletion starts within about 5 nucleotides to about 10 nucleotides downstream of the 5′-NTTN-3′ sequence and ends within about 20 nucleotides to about 25 nucleotides downstream of the 5′-NTTN-3′ sequence.

[0102] In one aspect of the method, the deletion starts within about 5 nucleotides to about 10 nucleotides downstream of the 5′-NTTN-3′ sequence and ends within about 25 nucleotides to about 30 nucleotides downstream of the 5′-NTTN-3′ sequence.

[0103] In one aspect of the method, the deletion starts within about 10 nucleotides to about 15 nucleotides downstream of the 5′-NTTN-3′ sequence and ends within about 20 nucleotides to about 30 nucleotides downstream of the 5′-NTTN-3′ sequence.

[0104] In one aspect of the method, the deletion starts within about 10 nucleotides to about 15 nucleotides downstream of the 5′-NTTN-3′ sequence and ends within about 20 nucleotides to about 25 nucleotides downstream of the 5′-NTTN-3′ sequence.

[0105] In one aspect of the method, the deletion starts within about 10 nucleotides to about 15 nucleotides 5 downstream of the 5′-NTTN-3′ sequence and ends within about 25 nucleotides to about 30 nucleotides downstream of the 5′-NTTN-3′ sequence.

[0106] In one aspect of the method, the 5′-NTTN-3′ sequence is 5′-CTTT-3′, 5′-CTTC-3′, 5′-GTTT-3′, 5′-GTTC-3′, 5′-TTTC-3′, 5′-GTTA-3′, or 5′-GTTG-3′.

[0107] In one aspect of the method, the deletion overlaps with a mutation in the gene.

[0108] In one aspect of the method, the deletion overlaps with an insertion in the gene.

[0109] In one aspect of the method, the deletion removes a repeat expansion of the gene or a portion thereof.

[0110] In one aspect of the method, the deletion disrupts one or both alleles of the gene.

[0111] In one aspect of the method, the deletion disrupts a GATAA motif of an enhancer region of the BCL11A gene.

[0112] In one aspect of the composition, RNA guide, nucleic acid, vector, cell, kit or method described herein, the composition, RNA guide, nucleic acid, vector, cell, kit or method disrupts a GATAA motif of an enhancer region of the BCL11A gene.

[0113] In one aspect of the composition, cell, kit or method described herein, the composition, cell, kit or method comprises at least two RNA guides targeting a GATAA motif of an enhancer region of the BCL11A gene.

[0114] In one aspect of the composition, cell, kit or method described herein, the at least two RNA guides comprise at least 90% identity to:

(SEQ ID NO: 2677)
AGAAAUCCGUCUUUCAUUGACGGGAAGCUAGUCUAGUGCAAGC;
(SEQ ID NO: 2678)
AGAAAUCCGUCUUUCAUUGACGGCUGGAGCCUGUGAUAAAAGC;
and/or
(SEQ ID NO: 66)
AGAAAUCCGUCUUUCAUUGACGGUACCCCACCCACGCCCCCAC.

[0115] In one aspect of the composition, cell, kit or method described herein, the at least two RNA guides comprise at least 95% identity to:

(SEQ ID NO: 2677)
AGAAAUCCGUCUUUCAUUGACGGGAAGCUAGUCUAGUGCAAGC;
(SEQ ID NO: 2678)
AGAAAUCCGUCUUUCAUUGACGGCUGGAGCCUGUGAUAAAAGC;
and/or
(SEQ ID NO: 2679)
AGAAAUCCGUCUUUCAUUGACGGUACCCCACCCACGCCCCCAC.

[0116] In one aspect of the composition, cell, kit or method described herein, the at least two RNA guides comprise at least two sequences of:

(SEQ ID NO: 2677)
AGAAAUCCGUCUUUCAUUGACGGGAAGCUAGUCUAGUGCAAGC;
(SEQ ID NO: 2678)
AGAAAUCCGUCUUUCAUUGACGGCUGGAGCCUGUGAUAAAAGC;
and
(SEQ ID NO: 2679)
AGAAAUCCGUCUUUCAUUGACGGUACCCCACCCACGCCCCCAC.

[0117] In one aspect of the composition, RNA guide, nucleic acid, vector, cell, kit or method described herein, the RNA guide consists of the sequence of:

(SEQ ID NO: 2677)
AGAAAUCCGUCUUUCAUUGACGGGAAGCUAGUCUAGUGCAAGC;
(SEQ ID NO: 2678)
AGAAAUCCGUCUUUCAUUGACGGCUGGAGCCUGUGAUAAAAGC;
or
(SEQ ID NO: 2679)
AGAAAUCCGUCUUUCAUUGACGGUACCCCACCCACGCCCCCAC.

[0118] In one aspect of the composition, RNA guide, nucleic acid, vector, cell, kit or method described herein, the RNA guide does not consist of the sequence of:

(SEQ ID NO: 2677)
AGAAAUCCGUCUUUCAUUGACGGGAAGCUAGUCUAGUGCAAGC;
(SEQ ID NO: 2678)
AGAAAUCCGUCUUUCAUUGACGGCUGGAGCCUGUGAUAAAAGC;
or
(SEQ ID NO: 2679)
AGAAAUCCGUCUUUCAUUGACGGUACCCCACCCACGCCCCCAC.

### Definitions

[0119] The present invention will be described with respect to particular embodiments, but the invention is not limited thereto but only by the claims. Terms as set forth hereinafter are generally to be understood in their common sense unless indicated otherwise.

[0120] As used herein, the term “activity” refers to a biological activity. In some embodiments, activity includes enzymatic activity, e.g., catalytic ability of an effector. For example, activity can include nuclease activity.

[0121] As used herein the term “BCL11A” refers to “B-cell lymphoma/leukemia 11A.” BCL11A plays a role in hematopoietic development and may also function as a leukemia disease gene. SEQ ID NO: 2635 as set forth herein provides an example of a BCL11A gene sequence. It is understood that spacer sequences described herein can target SEQ ID NO: 2635 or the reverse complement thereof, depending upon whether they are indicated as “+” or “−” as set forth in Table 5. The target sequences listed in Table 5 are on the non-target strand of the BCL11A gene.

[0122] As used herein, the term “Cas12i polypeptide” (also referred to herein as Cas12i) refers to a polypeptide that binds to a target sequence on a target nucleic acid specified by an RNA guide, wherein the polypeptide has at least some amino acid sequence homology to a wild-type Cas12i polypeptide. In some embodiments, the Cas12i polypeptide comprises at least 75%, at least 80%, at least 81%, at least 82%, at least 83%, at least 84%, at least 85%, at least 90%, at least 91%, at least 92%, at least 93%, at least 94%, at least 95%, at least 96%, at least 97%, at least 98%, at least 99% or 100% sequence identity with any one of SEQ ID NOs: 1-5 and 11-18 of U.S. Pat. No. 10,808,245, which is incorporated by reference herein in its entirety. In some embodiments, a Cas12i polypeptide comprises at least 75%, at least 80%, at least 81%, at least 82%, at least 83%, at least 84%, at least 85%, at least 90%, at least 91%, at least 92%, at least 93%, at least 94%, at least 95%, at least 96%, at least 97%, at least 98%, at least 99% or 100% sequence identity with any one of SEQ ID NO: 3 (Cas12i1), SEQ ID NO: 5 (Cas12i2), SEQ ID NO: 14 (Cas12i3), or SEQ ID NO: 16 (Cas12i4) of U.S. Pat. No. 10,808,245, corresponding to SEQ ID NOs: 2650, 2634, 2651, and 2647 of the present application. In some embodiments, a Cas12i polypeptide of the disclosure is a Cas12i1 polypeptide or Cas12i2 polypeptide as described in PCT/US2021/025257. In some embodiments, the Cas12i polypeptide cleaves a target nucleic acid (e.g., as a nick or a double strand break).

[0123] As used herein, the term “complex” refers to a grouping of two or more molecules. In some embodiments, the complex comprises a polypeptide and a nucleic acid molecule interacting with (e.g., binding to, coming into contact with, adhering to) one another. As used herein, the term “complex” can refer to a grouping of an RNA guide and a polypeptide (e.g., a Cas12i polypeptide). As used herein, the term “complex” can refer to a grouping of an RNA guide, a polypeptide, and a target sequence. As used herein, the term “complex” can refer to a grouping of a BCL11A-targeting RNA guide and a Cas12i polypeptide.

[0124] As used herein, the term “protospacer adjacent motif” or “PAM” refers to a DNA sequence adjacent to a target sequence (e.g., a BCL11A target sequence) to which a complex comprising an RNA guide (e.g., a BCL11A-targeting RNA guide) and a Cas12i polypeptide binds. In the case of a double-stranded target, the RNA guide binds to a first strand of the target (e.g., the target strand or the spacer-complementary strand), and a PAM sequence as described herein is present in the second, complementary strand (e.g., the non-target strand or the non-spacer-complementary strand). As used herein, the term “adjacent” includes instances in which the RNA guide of a complex comprising an RNA guide and a Cas12i polypeptide specifically binds, interacts, or associates with a target sequence that is immediately adjacent to a PAM. In such instances, there are no nucleotides between the target sequence and the PAM. The term “adjacent” also includes instances in which there are a small number (e.g., 1, 2, 3, 4, or 5) of nucleotides between the target sequence, to which the RNA guide binds, and the PAM. In some embodiments, the PAM sequence as described herein is present in the non-target strand (e.g., the non-spacer-complementary strand). In such a case, the term “adjacent” includes a PAM sequence as described herein as being immediately adjacent to (or within a small number, e.g., 1, 2, 3, 4, or 5 nucleotides of) a sequence in the non-target strand.

[0125] As used herein, the term “RNA guide” refers to any RNA molecule that facilitates the targeting of a polypeptide (e.g., a Cas12i polypeptide) described herein to a target sequence (e.g., a sequence of a BCL11A gene). An RNA guide may be designed to include sequences that are complementary to a specific nucleic acid sequence (e.g., a BCL11A nucleic acid sequence). An RNA guide may comprise a DNA targeting sequence (i.e., a spacer sequence) and a direct repeat (DR) sequence. The term “crRNA” is also used herein to refer to an RNA guide.

[0126] In some embodiments, a spacer sequence is complementary to a target sequence. As used herein, the term “complementary” refers to the ability of nucleobases of a first nucleic acid molecule, such as an RNA guide, to base pair with nucleobases of a second nucleic acid molecule, such as a target sequence. Two complementary nucleic acid molecules are able to non-covalently bind under appropriate temperature and solution ionic strength conditions. In some embodiments, a first nucleic acid molecule (e.g., a spacer sequence of an RNA guide) comprises 100% complementarity to a second nucleic acid (e.g., a target sequence). In some embodiments, a first nucleic acid molecule (e.g., a spacer sequence of an RNA guide) is complementary to a second nucleic acid molecule (e.g., a target sequence) if the first nucleic acid molecule comprises at least about 80%, 81%, 82%, 83%, 84%, 85%, 86%, 87%, 88%, 89%, 90%, 91%, 92%, 93%, 94%, 95%, 96%, 97%, 98%, or 99% complementarity to the second nucleic acid. As used herein, the term “substantially complementary” refers to a polynucleotide (e.g., a spacer sequence of an RNA guide) that has a certain level of complementarity to a target sequence. In some embodiments, the level of complementarity is such that the polynucleotide can hybridize to the target sequence with sufficient affinity to permit an effector polypeptide (e.g., Cas12i) that is complexed with the polynucleotide to act (e.g., cleave) on the target sequence. In some embodiments, a spacer sequence that is substantially complementary to a target sequence has less than 100% complementarity to the target sequence. In some embodiments, a spacer sequence that is substantially complementary to a target sequence has at least about 80%, 81%, 82%, 83%, 84%, 85%, 86%, 87%, 88%, 89%, 90%, 91%, 92%, 93%, 94%, 95%, 96%, 97%, 98%, or 99% complementarity to the target sequence. In some embodiments, an RNA guide with a spacer sequence that is substantially complementary to a target sequence has 100% complementarity to the target sequence.

[0127] As used herein, the terms “target” and “target sequence” refer to a nucleic acid sequence to which an RNA guide specifically binds. In some embodiments, the DNA targeting sequence (e.g., spacer) of an RNA guide binds to a target sequence. In the case of a double-stranded target, the RNA guide binds to a first strand of the target (i.e., the target strand or the spacer-complementary strand), and a PAM sequence as described herein is present in the second, complementary strand (i.e., the non-target strand or the non-spacer-complementary strand). In some embodiments, the target strand (i.e., the spacer-complementary strand) comprises a 5′-NAAN-3′ sequence. In some embodiments, the target sequence is a sequence within a BCL11A gene sequence, including, but not limited, to the sequence set forth in SEQ ID NO: 2635 or the reverse complement thereof.

[0128] As used herein, the terms “upstream” and “downstream” refer to relative positions within a single nucleic acid (e.g., DNA) sequence in a nucleic acid molecule. “Upstream” and “downstream” relate to the 5′ to 3′ direction, respectively, in which RNA transcription occurs. A first sequence is upstream of a second sequence when the 3′ end of the first sequence occurs before the 5′ end of the second sequence. A first sequence is downstream of a second sequence when the 5′ end of the first sequence occurs after the 3′ end of the second sequence. In some embodiments, the 5′-NTTN-3′ sequence is upstream of an indel described herein, and a Cas12i-induced indel is downstream of the 5′-NTTN-3′ sequence.

### BRIEF DESCRIPTION OF THE DRAWINGS

[0129] FIG. 1 shows indel activity in CD34+ HSPC cells after targeting BCL11A intronic erythroid enhancer with different individual and multiplexed crRNAs in complex with a variant Cas12i2 of SEQ ID NO: 2642 at various RNP concentrations. Error bars represent standard deviation of the mean of two bioreplicates (two individual donors).

[0130] FIG. 2 shows viability of modified CD34+ HSPC cells 72 hours following targeting of BCL11A intronic erythroid enhancer in primary CD34+ HSPCs. Different concentrations of BCL11A intronic erythroid enhancer targeting RNPs comprising variant Cas12i2 of SEQ ID NO: 2642 and crRNAs were tested. crRNAs were tested individually and in multiplexed configuration. Error bars represent standard deviation of the mean of two bioreplicates (two individual donors).

### DETAILED DESCRIPTION

[0131] The present disclosure relates to an RNA guide capable of binding to BCL11A and methods of use thereof. In some aspects, a composition comprising an RNA guide having one or more characteristics is described herein. In some aspects, a method of producing the RNA guide is described. In some aspects, a method of delivering a composition comprising the RNA guide is described.

### Composition

[0132] In some aspects, the invention described herein comprises compositions comprising an RNA guide targeting a BCL11A gene or a portion of the BCL11A gene. In some embodiments, the RNA guide is comprised of a direct repeat component and a spacer component. In some embodiments, the RNA guide binds a Cas12i polypeptide. In some embodiments, the spacer component is substantially complementary to a BCL11A target sequence, wherein the BCL11A target sequence is adjacent to a 5′-NTTN-3′ PAM sequence as described herein. In the case of a double-stranded target, the RNA guide binds to a first strand of the target (i.e., the target strand or the spacer-complementary strand) and a PAM sequence as described herein is present in the second, complementary strand (i.e., the non-target strand or the non-spacer-complementary strand).

[0133] In some embodiments, the invention described herein comprises compositions comprising a complex, wherein the complex comprises an RNA guide targeting BCL11A. In some embodiments, the invention comprises a complex comprising an RNA guide and a Cas12i polypeptide. In some embodiments, the RNA guide and the Cas12i polypeptide bind to each other in a molar ratio of about 1:1. In some embodiments, a complex comprising an RNA guide and a Cas12i polypeptide binds to a BCL11A target sequence. In some embodiments, a complex comprising an RNA guide targeting BCL11A and a Cas12i polypeptide binds to a BCL11A target sequence at a molar ratio of about 1:1. In some embodiments, the complex comprises enzymatic activity, such as nuclease activity, that can cleave the BCL11A target sequence. The RNA guide, the Cas12i polypeptide, and the BCL11A target sequence, either alone or together, do not naturally occur.

[0134] Use of the compositions disclosed herein has advantages over those of other known nuclease systems. Cas12i polypeptides are smaller than other nucleases. For example, Cas12i2 is 1,054 amino acids in length, whereas S. pyogenes Cas9 (SpCas9) is 1,368 amino acids in length, S. thermophilus Cas9 (StCas9) is 1,128 amino acids in length, FnCpf1 is 1,300 amino acids in length, AsCpf1 is 1,307 amino acids in length, and LbCpf1 is 1,246 amino acids in length. Cas12i RNA guides, which do not require a trans-activating CRISPR RNA (tracrRNA), are also smaller than Cas9 RNA guides. The smaller Cas12i polypeptide and RNA guide sizes are beneficial for delivery. Compositions comprising a Cas12i polypeptide also demonstrate decreased off-target activity compared to compositions comprising an SpCas9 polypeptide. See PCT/US2021/025257, which is incorporated by reference in its entirety. Furthermore, indels induced by compositions comprising a Cas12i polypeptide differ from indels induced by compositions comprising an SpCas9 polypeptide. For example, SpCas9 polypeptides primarily induce insertions and deletions of 1 nucleotide in length. However, Cas12i polypeptides induce larger deletions, which can be beneficial in disrupting a larger portion of a gene such as BCL11A.

### RNA Guide

[0135] In some embodiments, the composition described herein comprises an RNA guide targeting BCL11A. In some embodiments, the composition described herein comprises two or more (e.g., 2, 3, 4, 5, 6, 7, 8, 9, or more) RNA guides targeting BCL11A.

[0136] The RNA guide may direct the Cas12i polypeptide as described herein to a BCL11A target sequence. Two or more RNA guides may target two or more separate Cas12i polypeptides (e.g., Cas12i polypeptides having the same or different sequence) as described herein to two or more (e.g., 2, 3, 4, 5, 6, 7, 8, 9, or more) BCL11A target sequences.

[0137] Those skilled in the art reading the below examples of particular kinds of RNA guides will understand that, in some embodiments, an RNA guide is BCL11A target-specific. That is, in some embodiments, an RNA guide binds specifically to one or more BCL11A target sequences (e.g., within a cell) and not to non-targeted sequences (e.g., non-specific DNA or random sequences within the same cell).

[0138] In some embodiments, the RNA guide comprises a spacer sequence followed by a direct repeat sequence, referring to the sequences in the 5′ to 3′ direction. In some embodiments, the RNA guide comprises a first direct repeat sequence followed by a spacer sequence and a second direct repeat sequence, referring to the sequences in the 5′ to 3′ direction. In some embodiments, the first and second direct repeats of such an RNA guide are identical. In some embodiments, the first and second direct repeats of such an RNA guide are different.

[0139] In some embodiments, the spacer sequence and the direct repeat sequence(s) of the RNA guide are present within the same RNA molecule. In some embodiments, the spacer and direct repeat sequences are linked directly to one another. In some embodiments, a short linker is present between the spacer and direct repeat sequences, e.g., an RNA linker of 1, 2, or 3 nucleotides in length. In some embodiments, the spacer sequence and the direct repeat sequence(s) of the RNA guide are present in separate molecules, which are joined to one another by base pairing interactions.

[0140] Additional information regarding exemplary direct repeat and spacer components of RNA guides is provided as follows.

[0141] Direct Repeat

[0142] In some embodiments, the RNA guide comprises a direct repeat sequence. In some embodiments, the direct repeat sequence of the RNA guide has a length of between 12-100, 13-75, 14-50, or 15-40 nucleotides (e.g., 15, 16, 17, 18, 19, 20, 21, 22, 23, 24, 25, 26, 27, 28, 29, 30, 31, 32, 33, 34, 35, 36, 37, 38, 39, or 40 nucleotides).

[0143] In some embodiments, the direct repeat sequence is or comprises a sequence of Table 1 or a portion of a sequence of Table 1. The direct repeat sequence can comprise nucleotide 1 through nucleotide 36 of any one of SEQ ID NOs: 1, 2, 3, 4, 5, 6, 7, or 8. The direct repeat sequence can comprise nucleotide 2 through nucleotide 36 of any one of SEQ ID NOs: 1, 2, 3, 4, 5, 6, 7, or 8. The direct repeat sequence can comprise nucleotide 3 through nucleotide 36 of any one of SEQ ID NOs: 1, 2, 3, 4, 5, 6, 7, or 8. The direct repeat sequence can comprise nucleotide 4 through nucleotide 36 of any one of SEQ ID NOs: 1, 2, 3, 4, 5, 6, 7, or 8. The direct repeat sequence can comprise nucleotide 5 through nucleotide 36 of any one of SEQ ID NOs: 1, 2, 3, 4, 5, 6, 7, or 8. The direct repeat sequence can comprise nucleotide 6 through nucleotide 36 of any one of SEQ ID NOs: 1, 2, 3, 4, 5, 6, 7, or 8. The direct repeat sequence can comprise nucleotide 7 through nucleotide 36 of any one of SEQ ID NOs: 1, 2, 3, 4, 5, 6, 7, or 8. The direct repeat sequence can comprise nucleotide 8 through nucleotide 36 of any one of SEQ ID NOs: 1, 2, 3, 4, 5, 6, 7, or 8. The direct repeat sequence can comprise nucleotide 9 through nucleotide 36 of any one of SEQ ID NOs: 1, 2, 3, 4, 5, 6, 7, or 8. The direct repeat sequence can comprise nucleotide 10 through nucleotide 36 of any one of SEQ ID NOs: 1, 2, 3, 4, 5, 6, 7, or 8. The direct repeat sequence can comprise nucleotide 11 through nucleotide 36 of any one of SEQ ID NOs: 1, 2, 3, 4, 5, 6, 7, or 8. The direct repeat sequence can comprise nucleotide 12 through nucleotide 36 of any one of SEQ ID NOs: 1, 2, 3, 4, 5, 6, 7, or 8. The direct repeat sequence can comprise nucleotide 13 through nucleotide 36 of any one of SEQ ID NOs: 1, 2, 3, 4, 5, 6, 7, or 8. The direct repeat sequence can comprise nucleotide 14 through nucleotide 36 of any one of SEQ ID NOs: 1, 2, 3, 4, 5, 6, 7, or 8. The direct repeat sequence can comprise nucleotide 1 through nucleotide 34 of SEQ ID NO: 9. The direct repeat sequence can comprise nucleotide 2 through nucleotide 34 of SEQ ID NO: 9. The direct repeat sequence can comprise nucleotide 3 through nucleotide 34 of SEQ ID NO: 9. The direct repeat sequence can comprise nucleotide 4 through nucleotide 34 of SEQ ID NO: 9. The direct repeat sequence can comprise nucleotide 5 through nucleotide 34 of SEQ ID NO: 9. The direct repeat sequence can comprise nucleotide 6 through nucleotide 34 of SEQ ID NO: 9. The direct repeat sequence can comprise nucleotide 7 through nucleotide 34 of SEQ ID NO: 9. The direct repeat sequence can comprise nucleotide 8 through nucleotide 34 of SEQ ID NO: 9. The direct repeat sequence can comprise nucleotide 9 through nucleotide 34 of SEQ ID NO: 9. The direct repeat sequence can comprise nucleotide 10 through nucleotide 34 of SEQ ID NO: 9. The direct repeat sequence can comprise nucleotide 11 through nucleotide 34 of SEQ ID NO: 9. The direct repeat sequence can comprise nucleotide 12 through nucleotide 34 of SEQ ID NO: 9. In some embodiments, the direct repeat sequence is set forth in SEQ ID NO: 10. In some embodiments, the direct repeat sequence comprises a portion of the sequence set forth in SEQ ID NO: 10.

[0144] In some embodiments, the direct repeat sequence has or comprises a sequence comprising at least 90% identity (e.g., at least 90%, 91%, 92%, 93%, 94%, 95%, 96%, 97%, 98% or 99% identity) to a sequence of Table 1 or a portion of a sequence of Table 1. The direct repeat sequence can have or comprise a sequence having at least 90% identity to a sequence comprising nucleotide 1 through nucleotide 36 of any one of SEQ ID NOs: 1, 2, 3, 4, 5, 6, 7, or 8. The direct repeat sequence can have or comprise a sequence having at least 90% identity to a sequence comprising 2 through nucleotide 36 of any one of SEQ ID NOs: 1, 2, 3, 4, 5, 6, 7, or 8. The direct repeat sequence can have or comprise a sequence having at least 90% identity to a sequence comprising 3 through nucleotide 36 of any one of SEQ ID NOs: 1, 2, 3, 4, 5, 6, 7, or 8. The direct repeat sequence can have or comprise a sequence having at least 90% identity to a sequence comprising 4 through nucleotide 36 of any one of SEQ ID NOs: 1, 2, 3, 4, 5, 6, 7, or 8. The direct repeat sequence can have or comprise a sequence having at least 90% identity to a sequence comprising 5 through nucleotide 36 of any one of SEQ ID NOs: 1, 2, 3, 4, 5, 6, 7, or 8. The direct repeat sequence can have or comprise a sequence having at least 90% identity to a sequence comprising 6 through nucleotide 36 of any one of SEQ ID NOs: 1, 2, 3, 4, 5, 6, 7, or 8. The direct repeat sequence can have or comprise a sequence having at least 90% identity to a sequence comprising 7 through nucleotide 36 of any one of SEQ ID NOs: 1, 2, 3, 4, 5, 6, 7, or 8. The direct repeat sequence can have or comprise a sequence having at least 90% identity to a sequence comprising 8 through nucleotide 36 of any one of SEQ ID NOs: 1, 2, 3, 4, 5, 6, 7, or 8. The direct repeat sequence can have or comprise a sequence having at least 90% identity to a sequence comprising 9 through nucleotide 36 of any one of SEQ ID NOs: 1, 2, 3, 4, 5, 6, 7, or 8. The direct repeat sequence can have or comprise a sequence having at least 90% identity to a sequence comprising 10 through nucleotide 36 of any one of SEQ ID NOs: 1, 2, 3, 4, 5, 6, 7, or 8. The direct repeat sequence can have or comprise a sequence having at least 90% identity to a sequence comprising 11 through nucleotide 36 of any one of SEQ ID NOs: 1, 2, 3, 4, 5, 6, 7, or 8. The direct repeat sequence can have or comprise a sequence having at least 90% identity to a sequence comprising 12 through nucleotide 36 of any one of SEQ ID NOs: 1, 2, 3, 4, 5, 6, 7, or 8. The direct repeat sequence can have or comprise a sequence having at least 90% identity to a sequence comprising 13 through nucleotide 36 of any one of SEQ ID NOs: 1, 2, 3, 4, 5, 6, 7, or 8. The direct repeat sequence can have or comprise a sequence having at least 90% identity to a sequence comprising 14 through nucleotide 36 of any one of SEQ ID NOs: 1, 2, 3, 4, 5, 6, 7, or 8. The direct repeat sequence can have or comprise a sequence having at least 90% identity to a sequence comprising 1 through nucleotide 34 of SEQ ID NO: 9. The direct repeat sequence can have or comprise a sequence having at least 90% identity to a sequence comprising 2 through nucleotide 34 of SEQ ID NO: 9. The direct repeat sequence can have or comprise a sequence having at least 90% identity to a sequence comprising 3 through nucleotide 34 of SEQ ID NO: 9. The direct repeat sequence can have or comprise a sequence having at least 90% identity to a sequence comprising 4 through nucleotide 34 of SEQ ID NO: 9. The direct repeat sequence can have or comprise a sequence having at least 90% identity to a sequence comprising 5 through nucleotide 34 of SEQ ID NO: 9. The direct repeat sequence can have or comprise a sequence having at least 90% identity to a sequence comprising 6 through nucleotide 34 of SEQ ID NO: 9. The direct repeat sequence can have or comprise a sequence having at least 90% identity to a sequence comprising 7 through nucleotide 34 of SEQ ID NO: 9. The direct repeat sequence can have or comprise a sequence having at least 90% identity to a sequence comprising 8 through nucleotide 34 of SEQ ID NO: 9. The direct repeat sequence can have or comprise a sequence having at least 90% identity to a sequence comprising 9 through nucleotide 34 of SEQ ID NO: 9. The direct repeat sequence can have or comprise a sequence having at least 90% identity to a sequence comprising 10 through nucleotide 34 of SEQ ID NO: 9. The direct repeat sequence can have or comprise a sequence having at least 90% identity to a sequence comprising 11 through nucleotide 34 of SEQ ID NO: 9. The direct repeat sequence can have or comprise a sequence having at least 90% identity to a sequence comprising 12 through nucleotide 34 of SEQ ID NO: 9. In some embodiments, the direct repeat sequence has at least 90% identity (e.g., at least 90%, 91%, 92%, 93%, 94%, 95%, 96%, 97%, 98% or 99% identity) to SEQ ID NO: 10. In some embodiments, the direct repeat sequence has at least 90% identity to a portion of the sequence set forth in SEQ ID NO: 10.

[0145] In some embodiments, compositions comprising a Cas12i2 polypeptide and an RNA guide comprising the direct repeat of SEQ ID NO: 10 and a spacer length of 20 nucleotides are capable of introducing indels into a BCL11A target sequence. See Example 1.

[0146] In some embodiments, the direct repeat sequence is or comprises a sequence that is at least 90% identical to the reverse complement of any one of SEQ ID NOs: 1-10. In some embodiments, the direct repeat sequence is or comprises the reverse complement of any one of SEQ ID NOs: 1-10.

TABLE 1
Direct repeat sequences

| Sequence | |
|---|---|
| identifier | Direct Repeat Sequence |
| SEQ ID NO: 1 | GUUGCAAAACCCAAGAAA |
| | UCCGUCUUUCAUUGACGG |
| SEQ ID NO: 2 | AAUAGCGGCCCUAAGAAA |
| | UCCGUCUUUCAUUGACGG |
| SEQ ID NO: 3 | AUUGGAACUGGCGAGAAA |
| | UCCGUCUUUCAUUGACGG |
| SEQ ID NO: 4 | CCAGCAACACCUAAGAAA |
| | UCCGUCUUUCAUUGACGG |
| SEQ ID NO: 5 | CGGCGCUCGAAUAGGAAA |
| | UCCGUCUUUCAUUGACGG |
| SEQ ID NO: 6 | GUGGCAACACCUAAGAAA |
| | UCCGUCUUUCAUUGACGG |
| SEQ ID NO: 7 | GUUGCAACACCUAAGAAA |
| | UCCGUCUUUCAUUGACGG |
| SEQ ID NO: 8 | GUUGCAAUGCCUAAGAAA |
| | UCCGUCUUUCAUUGACGG |
| SEQ ID NO: 9 | GCAACACCUAAGAAAUCC |
| | GUCUUUCAUUGACGGG |
| SEQ ID NO: 10 | AGAAAUCCGUCUUUCAUU |
| | GACGG |

[0147] In some embodiments, the direct repeat sequence is a sequence of Table 2 or a portion of a sequence of Table 2. The direct repeat sequence can comprise nucleotide 1 through nucleotide 36 of any one of SEQ ID NOs: 2652, 2653, 2654, 2655, 2656, 2657, 2658, 2659, 2660, 2661, 2662, 2663, 2664, 2665, 2666, 2667, 2668, or 2669. The direct repeat sequence can comprise nucleotide 2 through nucleotide 36 of any one of SEQ ID NOs: 2652, 2653, 2654, 2655, 2656, 2657, 2658, 2659, 2660, 2661, 2662, 2663, 2664, 2665, 2666, 2667, 2668, or 2669. The direct repeat sequence can comprise nucleotide 3 through nucleotide 36 of any one of SEQ ID NOs: 2652, 2653, 2654, 2655, 2656, 2657, 2658, 2659, 2660, 2661, 2662, 2663, 2664, 2665, 2666, 2667, 2668, or 2669. The direct repeat sequence can comprise nucleotide 4 through nucleotide 36 of any one of SEQ ID NOs: 2652, 2653, 2654, 2655, 2656, 2657, 2658, 2659, 2660, 2661, 2662, 2663, 2664, 2665, 2666, 2667, 2668, or 2669. The direct repeat sequence can comprise nucleotide 5 through nucleotide 36 of any one of SEQ ID NOs: 2652, 2653, 2654, 2655, 2656, 2657, 2658, 2659, 2660, 2661, 2662, 2663, 2664, 2665, 2666, 2667, 2668, or 2669. The direct repeat sequence can comprise nucleotide 6 through nucleotide 36 of any one of SEQ ID NOs: 2652, 2653, 2654, 2655, 2656, 2657, 2658, 2659, 2660, 2661, 2662, 2663, 2664, 2665, 2666, 2667, 2668, or 2669. The direct repeat sequence can comprise nucleotide 7 through nucleotide 36 of any one of SEQ ID NOs: 2652, 2653, 2654, 2655, 2656, 2657, 2658, 2659, 2660, 2661, 2662, 2663, 2664, 2665, 2666, 2667, 2668, or 2669. The direct repeat sequence can comprise nucleotide 8 through nucleotide 36 of any one of SEQ ID NOs: 2652, 2653, 2654, 2655, 2656, 2657, 2658, 2659, 2660, 2661, 2662, 2663, 2664, 2665, 2666, 2667, 2668, or 2669. The direct repeat sequence can comprise nucleotide 9 through nucleotide 36 of any one of SEQ ID NOs: 2652, 2653, 2654, 2655, 2656, 2657, 2658, 2659, 2660, 2661, 2662, 2663, 2664, 2665, 2666, 2667, 2668, or 2669. The direct repeat sequence can comprise nucleotide 10 through nucleotide 36 of any one of SEQ ID NOs: 2652, 2653, 2654, 2655, 2656, 2657, 2658, 2659, 2660, 2661, 2662, 2663, 2664, 2665, 2666, 2667, 2668, or 2669. The direct repeat sequence can comprise nucleotide 11 through nucleotide 36 of any one of SEQ ID NOs: 2652, 2653, 2654, 2655, 2656, 2657, 2658, 2659, 2660, 2661, 2662, 2663, 2664, 2665, 2666, 2667, 2668, or 2669. The direct repeat sequence can comprise nucleotide 12 through nucleotide 36 of any one of SEQ ID NOs: 2652, 2653, 2654, 2655, 2656, 2657, 2658, 2659, 2660, 2661, 2662, 2663, 2664, 2665, 2666, 2667, 2668, or 2669. The direct repeat sequence can comprise nucleotide 13 through nucleotide 36 of any one of SEQ ID NOs: 2652, 2653, 2654, 2655, 2656, 2657, 2658, 2659, 2660, 2661, 2662, 2663, 2664, 2665, 2666, 2667, 2668, or 2669. The direct repeat sequence can comprise nucleotide 14 through nucleotide 36 of any one of SEQ ID NOs: 2652, 2653, 2654, 2655, 2656, 2657, 2658, 2659, 2660, 2661, 2662, 2663, 2664, 2665, 2666, 2667, 2668, or 2669.

[0148] In some embodiments, the direct repeat sequence has at least 95% identity (e.g., at least 95%, 96%, 97%, 98% or 99% identity) to a sequence of Table 2 or a portion of a sequence of Table 2. The direct repeat sequence can have at least 95% identity to a sequence comprising nucleotide 1 through nucleotide 36 of any one of SEQ ID NOs: 2652, 2653, 2654, 2655, 2656, 2657, 2658, 2659, 2660, 2661, 2662, 2663, 2664, 2665, 2666, 2667, 2668, or 2669. The direct repeat sequence can have at least 95% identity to a sequence comprising 2 through nucleotide 36 of any one of SEQ ID NOs: 2652, 2653, 2654, 2655, 2656, 2657, 2658, 2659, 2660, 2661, 2662, 2663, 2664, 2665, 2666, 2667, 2668, or 2669. The direct repeat sequence can have at least 95% identity to a sequence comprising 3 through nucleotide 36 of any one of SEQ ID NOs: 2652, 2653, 2654, 2655, 2656, 2657, 2658, 2659, 2660, 2661, 2662, 2663, 2664, 2665, 2666, 2667, 2668, or 2669. The direct repeat sequence can have at least 95% identity to a sequence comprising 4 through nucleotide 36 of any one of SEQ ID NOs: 2652, 2653, 2654, 2655, 2656, 2657, 2658, 2659, 2660, 2661, 2662, 2663, 2664, 2665, 2666, 2667, 2668, or 2669. The direct repeat sequence can have at least 95% identity to a sequence comprising 5 through nucleotide 36 of any one of SEQ ID NOs: 2652, 2653, 2654, 2655, 2656, 2657, 2658, 2659, 2660, 2661, 2662, 2663, 2664, 2665, 2666, 2667, 2668, or 2669. The direct repeat sequence can have at least 95% identity to a sequence comprising 6 through nucleotide 36 of any one of SEQ ID NOs: 2652, 2653, 2654, 2655, 2656, 2657, 2658, 2659, 2660, 2661, 2662, 2663, 2664, 2665, 2666, 2667, 2668, or 2669. The direct repeat sequence can have at least 95% identity to a sequence comprising 7 through nucleotide 36 of any one of SEQ ID NOs: 2652, 2653, 2654, 2655, 2656, 2657, 2658, 2659, 2660, 2661, 2662, 2663, 2664, 2665, 2666, 2667, 2668, or 2669. The direct repeat sequence can have at least 95% identity to a sequence comprising 8 through nucleotide 36 of any one of SEQ ID NOs: 2652, 2653, 2654, 2655, 2656, 2657, 2658, 2659, 2660, 2661, 2662, 2663, 2664, 2665, 2666, 2667, 2668, or 2669. The direct repeat sequence can have at least 95% identity to a sequence comprising 9 through nucleotide 36 of any one of SEQ ID NOs: 2652, 2653, 2654, 2655, 2656, 2657, 2658, 2659, 2660, 2661, 2662, 2663, 2664, 2665, 2666, 2667, 2668, or 2669. The direct repeat sequence can have at least 95% identity to a sequence comprising 10 through nucleotide 36 of any one of SEQ ID NOs: 2652, 2653, 2654, 2655, 2656, 2657, 2658, 2659, 2660, 2661, 2662, 2663, 2664, 2665, 2666, 2667, 2668, or 2669. The direct repeat sequence can have at least 95% identity to a sequence comprising 11 through nucleotide 36 of any one of SEQ ID NOs: 2652, 2653, 2654, 2655, 2656, 2657, 2658, 2659, 2660, 2661, 2662, 2663, 2664, 2665, 2666, 2667, 2668, or 2669. The direct repeat sequence can have at least 95% identity to a sequence comprising 12 through nucleotide 36 of any one of SEQ ID NOs: 2652, 2653, 2654, 2655, 2656, 2657, 2658, 2659, 2660, 2661, 2662, 2663, 2664, 2665, 2666, 2667, 2668, or 2669. The direct repeat sequence can have at least 95% identity to a sequence comprising 13 through nucleotide 36 of any one of SEQ ID NOs: 2652, 2653, 2654, 2655, 2656, 2657, 2658, 2659, 2660, 2661, 2662, 2663, 2664, 2665, 2666, 2667, 2668, or 2669.

[0149] In some embodiments, the direct repeat sequence has at least 90% identity (e.g., at least 90%, 91%, 92%, 93%, 94%, 95%, 96%, 97%, 98% or 99% identity) to a sequence of Table 2 or a portion of a sequence of Table 2. The direct repeat sequence can have at least 90% identity to a sequence comprising nucleotide 1 through nucleotide 36 of any one of SEQ ID NOs: 2652, 2653, 2654, 2655, 2656, 2657, 2658, 2659, 2660, 2661, 2662, 2663, 2664, 2665, 2666, 2667, 2668, or 2669. The direct repeat sequence can have at least 90% identity to a sequence comprising 2 through nucleotide 36 of any one of SEQ ID NOs: 2652, 2653, 2654, 2655, 2656, 2657, 2658, 2659, 2660, 2661, 2662, 2663, 2664, 2665, 2666, 2667, 2668, or 2669. The direct repeat sequence can have at least 90% identity to a sequence comprising 3 through nucleotide 36 of any one of SEQ ID NOs: 2652, 2653, 2654, 2655, 2656, 2657, 2658, 2659, 2660, 2661, 2662, 2663, 2664, 2665, 2666, 2667, 2668, or 2669. The direct repeat sequence can have at least 90% identity to a sequence comprising 4 through nucleotide 36 of any one of SEQ ID NOs: 2652, 2653, 2654, 2655, 2656, 2657, 2658, 2659, 2660, 2661, 2662, 2663, 2664, 2665, 2666, 2667, 2668, or 2669. The direct repeat sequence can have at least 90% identity to a sequence comprising 5 through nucleotide 36 of any one of SEQ ID NOs: 2652, 2653, 2654, 2655, 2656, 2657, 2658, 2659, 2660, 2661, 2662, 2663, 2664, 2665, 2666, 2667, 2668, or 2669. The direct repeat sequence can have at least 90% identity to a sequence comprising 6 through nucleotide 36 of any one of SEQ ID NOs: 2652, 2653, 2654, 2655, 2656, 2657, 2658, 2659, 2660, 2661, 2662, 2663, 2664, 2665, 2666, 2667, 2668, or 2669. The direct repeat sequence can have at least 90% identity to a sequence comprising 7 through nucleotide 36 of any one of SEQ ID NOs: 2652, 2653, 2654, 2655, 2656, 2657, 2658, 2659, 2660, 2661, 2662, 2663, 2664, 2665, 2666, 2667, 2668, or 2669. The direct repeat sequence can have at least 90% identity to a sequence comprising 8 through nucleotide 36 of any one of SEQ ID NOs: 2652, 2653, 2654, 2655, 2656, 2657, 2658, 2659, 2660, 2661, 2662, 2663, 2664, 2665, 2666, 2667, 2668, or 2669. The direct repeat sequence can have at least 90% identity to a sequence comprising 9 through nucleotide 36 of any one of SEQ ID NOs: 2652, 2653, 2654, 2655, 2656, 2657, 2658, 2659, 2660, 2661, 2662, 2663, 2664, 2665, 2666, 2667, 2668, or 2669. The direct repeat sequence can have at least 90% identity to a sequence comprising 10 through nucleotide 36 of any one of SEQ ID NOs: 2652, 2653, 2654, 2655, 2656, 2657, 2658, 2659, 2660, 2661, 2662, 2663, 2664, 2665, 2666, 2667, 2668, or 2669. The direct repeat sequence can have at least 90% identity to a sequence comprising 11 through nucleotide 36 of any one of SEQ ID NOs: 2652, 2653, 2654, 2655, 2656, 2657, 2658, 2659, 2660, 2661, 2662, 2663, 2664, 2665, 2666, 2667, 2668, or 2669. The direct repeat sequence can have at least 90% identity to a sequence comprising 12 through nucleotide 36 of any one of SEQ ID NOs: 2652, 2653, 2654, 2655, 2656, 2657, 2658, 2659, 2660, 2661, 2662, 2663, 2664, 2665, 2666, 2667, 2668, or 2669. The direct repeat sequence can have at least 90% identity to a sequence comprising 13 through nucleotide 36 of any one of SEQ ID NOs: 2652, 2653, 2654, 2655, 2656, 2657, 2658, 2659, 2660, 2661, 2662, 2663, 2664, 2665, 2666, 2667, 2668, or 2669.

[0150] In some embodiments, the direct repeat sequence is at least 90% identical to the reverse complement of any one of SEQ ID NOs: 2652, 2653, 2654, 2655, 2656, 2657, 2658, 2659, 2660, 2661, 2662, 2663, 2664, 2665, 2666, 2667, 2668, or 2669. In some embodiments, the direct repeat sequence is at least 95% identical to the reverse complement of any one of SEQ ID NOs: 2652, 2653, 2654, 2655, 2656, 2657, 2658, 2659, 2660, 2661, 2662, 2663, 2664, 2665, 2666, 2667, 2668, or 2669. In some embodiments, the direct repeat sequence is the reverse complement of any one of SEQ ID NOs: 2652, 2653, 2654, 2655, 2656, 2657, 2658, 2659, 2660, 2661, 2662, 2663, 2664, 2665, 2666, 2667, 2668, or 2669.

[0151] In some embodiments, the direct repeat sequence is at least 90% identical to SEQ ID NO: 2670 or a portion of SEQ ID NO: 2670. In some embodiments, the direct repeat sequence is at least 95% identical to SEQ ID NO: 2670 or a portion of SEQ ID NO: 2670. In some embodiments, the direct repeat sequence is 100% identical to SEQ ID NO: 2670 or a portion of SEQ ID NO: 2670.

TABLE 2
Cas1214 direct repeat sequences.

| Sequence identifier | Direct Repeat Sequence |
|---|---|
| SEQ ID NO: 2652 | UCUCAACGAUAGUCAGAC |
| | AUGUGUCCUCAGUGACAC |
| SEQ ID NO: 2653 | UUUUAACAACACUCAGGC |
| | AUGUGUCCACAGUGACAC |
| SEQ ID NO: 2654 | UUGAACGGAUACUCAGAC |
| | AUGUGUUUCCAGUGACAC |
| SEQ ID NO: 2655 | UGCCCUCAAUAGUCAGAU |
| | GUGUGUCCACAGUGACAC |
| SEQ ID NO: 2656 | UCUCAAUGAUACUUAGAU |
| | ACGUGUCCUCAGUGACAC |
| SEQ ID NO: 2657 | UCUCAAUGAUACUCAGAC |
| | AUGUGUCCCCAGUGACAC |
| SEQ ID NO: 2658 | UCUCAAUGAUACUAAGAC |
| | AUGUGUCCUCAGUGACAC |
| SEQ ID NO: 2659 | UCUCAACUAUACUCAGAC |
| | AUGUGUCCUCAGUGACAC |
| SEQ ID NO: 2660 | UCUCAACGAUACUCAGAC |
| | AUGUGUCCUCAGUGACAC |
| SEQ ID NO: 2661 | UCUCAACGAUACUAAGAU |
| | AUGUGUCCUCAGCGACAC |
| SEQ ID NO: 2662 | UCUCAACGAUACUAAGAU |
| | AUGUGUCCCCAGUGACAC |
| SEQ ID NO: 2663 | UCUCAACGAUACUAAGAU |
| | AUGUGUCCACAGUGACAC |
| SEQ ID NO: 2664 | UCUCAACAAUACUCAGAC |
| | AUGUGUCCCCAGUGACAC |
| SEQ ID NO: 2665 | UCUCAACAAUACUAAGGC |
| | AUGUGUCCCCAGUGACCC |
| SEQ ID NO: 2666 | UCUCAAAGAUACUCAGAC |
| | ACGUGUCCCCAGUGACAC |
| SEQ ID NO: 2667 | UCUCAAAAAUACUCAGAC |
| | AUGUGUCCUCAGUGACAC |
| SEQ ID NO: 2668 | GCGAAACAACAGUCAGAC |
| | AUGUGUCCCCAGUGACAC |
| SEQ ID NO: 2669 | CCUCAACGAUAUUAAGAC |
| | AUGUGUCCGCAGUGACAC |
| SEQ ID NO: 2670 | AGACAUGUGUCCUCAGUG |
| | ACAC |

[0152] In some embodiments, the direct repeat sequence is a sequence of Table 3 or a portion of a sequence of Table 3. In some embodiments, the direct repeat sequence has at least 95% identity (e.g., at least 95%, 96%, 97%, 98% or 99% identity) to a sequence of Table 3 or a portion of a sequence of Table 3. In some embodiments, the direct repeat sequence has at least 90% identity (e.g., at least 90%, 91%, 92%, 93%, 94%, 95%, 96%, 97%, 98% or 99% identity) to a sequence of Table 3 or a portion of a sequence of Table 3. In some embodiments, the direct repeat sequence is at least 90% identical to the reverse complement of any one of SEQ ID NOs: 2671-2673. In some embodiments, the direct repeat sequence is at least 95% identical to the reverse complement of any one of SEQ ID NOs: 2671-2673. In some embodiments, the direct repeat sequence is the reverse complement of any one of SEQ ID NOs: 2671-2673.

TABLE 3
Cas12il direct repeat sequences.

| Sequence identifier | Direct Repeat Sequence |
|---|---|
| SEQ ID NO: 2671 | GUUGGAAUGACUAAUUUU |
| | UGUGCCCACCGUUGGCAC |
| SEQ ID NO: 2672 | AAUUUUUGUGCCCAUCGU |
| | UGGCAC |
| SEQ ID NO: 2673 | AUUUUUGUGCCCAUCGUU |
| | GGCAC |

[0153] In some embodiments, the direct repeat sequence is a sequence of Table 4 or a portion of a sequence of Table 4. In some embodiments, the direct repeat sequence has at least 95% identity (e.g., at least 95%, 96%, 97%, 98% or 99% identity) to a sequence of Table 4 or a portion of a sequence of Table 4. In some embodiments, the direct repeat sequence has at least 90% identity (e.g., at least 90%, 91%, 92%, 93%, 94%, 95%, 96%, 97%, 98% or 99% identity) to a sequence of Table 4 or a portion of a sequence of Table 4. In some embodiments, the direct repeat sequence is at least 90% identical to the reverse complement of any one of SEQ ID NOs: 2674-2676. In some embodiments, the direct repeat sequence is at least 95% identical to the reverse complement of any one of SEQ ID NOs: 2674-2676. In some embodiments, the direct repeat sequence is the reverse complement of any one of SEQ ID NOs: 2674-2676.

TABLE 4
Cas12i3 direct repeat sequences.

| Sequence identifier | Direct Repeat Sequence |
|---|---|
| SEQ ID NO: 2674 | CUAGCAAUGACCUAAUAG |
| | UGUGUCCUUAGUUGACAU |
| SEQ ID NO: 2675 | CCUACAAUACCUAAGAAA |
| | UCCGUCCUAAGUUGACGG |
| SEQ ID NO: 2676 | AUAGUGUGUCCUUAGUUG |
| | ACAU |

[0154] In some embodiments, a direct repeat sequence described herein comprises a uracil (U). In some embodiments, a direct repeat sequence described herein comprises a thymine (T). In some embodiments, a direct repeat sequence according to Tables 1-4 comprises a sequence comprising a thymine in one or more places indicated as uracil in Tables 1-4.

[0155] Spacer

[0156] In some embodiments, the RNA guide comprises a DNA targeting or spacer sequence. In some embodiments, the spacer sequence of the RNA guide has a length of between 12-100, 13-75, 14-50, or 15-30 nucleotides (e.g., 15, 16, 17, 18, 19, 20, 21, 22, 23, 24, 25, 26, 27, 28, 29, or 30 nucleotides) and is complementary a specific target sequence. In some embodiments, the spacer sequence is designed to be complementary to a specific DNA strand, e.g., of a genomic locus.

[0157] In some embodiments, the RNA guide spacer sequence is substantially identical to a complementary strand of a target sequence. In some embodiments, the RNA guide comprises a sequence having at least about 60%, at least about 65%, at least about 70%, at least about 75%, at least about 80%, at least about 85%, at least about 90%, at least about 91%, at least about 92%, at least about 93%, at least about 94%, at least about 95%, at least about 96%, at least about 97%, at least about 98%, at least about 99%, or at least about 99.5% sequence identity to a complementary strand of a reference nucleic acid sequence, e.g., target sequence. The percent identity between two such nucleic acids can be determined manually by inspection of the two optimally aligned nucleic acid sequences or by using software programs or algorithms (e.g., BLAST, ALIGN, CLUSTAL) using standard parameters.

[0158] In some embodiments, the RNA guide comprises a spacer sequence that has a length of between 12-100, 13-75, 14-50, or 15-30 nucleotides (e.g., 15, 16, 17, 18, 19, 20, 21, 22, 23, 24, 25, 26, 27, 28, 29, or 30 nucleotides) and at least 80%, at least 90%, at least 95%, at least 96%, at least 97%, at least 98%, at least 99% complementary to a target sequence. In some embodiments, the RNA guide comprises a sequence at least 80%, at least 90%, at least 95%, at least 96%, at least 97%, at least 98%, at least 99% complementary to a target DNA sequence. In some embodiments, the RNA guide comprises a sequence at least 80%, at least 90%, at least 95%, at least 96%, at least 97%, at least 98%, at least 99% complementary to a target genomic sequence.

[0159] In some embodiments, the RNA guide comprises a sequence, e.g., RNA sequence, that is a length of up to 50 and at least 80%, at least 90%, at least 95%, at least 96%, at least 97%, at least 98%, at least 99% complementary to a target sequence. In some embodiments, the RNA guide comprises a sequence at least 80%, at least 90%, at least 95%, at least 96%, at least 97%, at least 98%, at least 99% complementary to a target DNA sequence. In some embodiments, the RNA guide comprises a sequence at least 80%, at least 90%, at least 95%, at least 96%, at least 97%, at least 98%, at least 99% complementary to a target genomic sequence.

[0160] In some embodiments, the spacer sequence is or comprises a sequence of Table 5 or a portion of a sequence of Table 5. The target sequences listed in Table 5 are on the non-target strand of the BCL11A sequence. It should be understood that an indication of SEQ ID NOs: 1322-2632 should be considered as equivalent to a listing of SEQ ID NOs: 1322-2632, with each of the intervening numbers present in the listing, i.e., 1322, 1323, 1324, 1325, 1326, 1327, 1328, 1329, 1330, 1331, 1332, 1333, 1334, 1335, 1336, 1337, 1338, 1339, 1340, 1341, 1342, 1343, 1344, 1345, 1346, 1347, 1348, 1349, 1350, 1351, 1352, 1353, 1354, 1355, 1356, 1357, 1358, 1359, 1360, 1361, 1362, 1363, 1364, 1365, 1366, 1367, 1368, 1369, 1370, 1371, 1372, 1373, 1374, 1375, 1376, 1377, 1378, 1379, 1380, 1381, 1382, 1383, 1384, 1385, 1386, 1387, 1388, 1389, 1390, 1391, 1392, 1393, 1394, 1395, 1396, 1397, 1398, 1399, 1400, 1401, 1402, 1403, 1404, 1405, 1406, 1407, 1408, 1409, 1410, 1411, 1412, 1413, 1414, 1415, 1416, 1417, 1418, 1419, 1420, 1421, 1422, 1423, 1424, 1425, 1426, 1427, 1428, 1429, 1430, 1431, 1432, 1433, 1434, 1435, 1436, 1437, 1438, 1439, 1440, 1441, 1442, 1443, 1444, 1445, 1446, 1447, 1448, 1449, 1450, 1451, 1452, 1453, 1454, 1455, 1456, 1457, 1458, 1459, 1460, 1461, 1462, 1463, 1464, 1465, 1466, 1467, 1468, 1469, 1470, 1471, 1472, 1473, 1474, 1475, 1476, 1477, 1478, 1479, 1480, 1481, 1482, 1483, 1484, 1485, 1486, 1487, 1488, 1489, 1490, 1491, 1492, 1493, 1494, 1495, 1496, 1497, 1498, 1499, 1500, 1501, 1502, 1503, 1504, 1505, 1506, 1507, 1508, 1509, 1510, 1511, 1512, 1513, 1514, 1515, 1516, 1517, 1518, 1519, 1520, 1521, 1522, 1523, 1524, 1525, 1526, 1527, 1528, 1529, 1530, 1531, 1532, 1533, 1534, 1535, 1536, 1537, 1538, 1539, 1540, 1541, 1542, 1543, 1544, 1545, 1546, 1547, 1548, 1549, 1550, 1551, 1552, 1553, 1554, 1555, 1556, 1557, 1558, 1559, 1560, 1561, 1562, 1563, 1564, 1565, 1566, 1567, 1568, 1569, 1570, 1571, 1572, 1573, 1574, 1575, 1576, 1577, 1578, 1579, 1580, 1581, 1582, 1583, 1584, 1585, 1586, 1587, 1588, 1589, 1590, 1591, 1592, 1593, 1594, 1595, 1596, 1597, 1598, 1599, 1600, 1601, 1602, 1603, 1604, 1605, 1606, 1607, 1608, 1609, 1610, 1611, 1612, 1613, 1614, 1615, 1616, 1617, 1618, 1619, 1620, 1621, 1622, 1623, 1624, 1625, 1626, 1627, 1628, 1629, 1630, 1631, 1632, 1633, 1634, 1635, 1636, 1637, 1638, 1639, 1640, 1641, 1642, 1643, 1644, 1645, 1646, 1647, 1648, 1649, 1650, 1651, 1652, 1653, 1654, 1655, 1656, 1657, 1658, 1659, 1660, 1661, 1662, 1663, 1664, 1665, 1666, 1667, 1668, 1669, 1670, 1671, 1672, 1673, 1674, 1675, 1676, 1677, 1678, 1679, 1680, 1681, 1682, 1683, 1684, 1685, 1686, 1687, 1688, 1689, 1690, 1691, 1692, 1693, 1694, 1695, 1696, 1697, 1698, 1699, 1700, 1701, 1702, 1703, 1704, 1705, 1706, 1707, 1708, 1709, 1710, 1711, 1712, 1713, 1714, 1715, 1716, 1717, 1718, 1719, 1720, 1721, 1722, 1723, 1724, 1725, 1726, 1727, 1728, 1729, 1730, 1731, 1732, 1733, 1734, 1735, 1736, 1737, 1738, 1739, 1740, 1741, 1742, 1743, 1744, 1745, 1746, 1747, 1748, 1749, 1750, 1751, 1752, 1753, 1754, 1755, 1756, 1757, 1758, 1759, 1760, 1761, 1762, 1763, 1764, 1765, 1766, 1767, 1768, 1769, 1770, 1771, 1772, 1773, 1774, 1775, 1776, 1777, 1778, 1779, 1780, 1781, 1782, 1783, 1784, 1785, 1786, 1787, 1788, 1789, 1790, 1791, 1792, 1793, 1794, 1795, 1796, 1797, 1798, 1799, 1800, 1801, 1802, 1803, 1804, 1805, 1806, 1807, 1808, 1809, 1810, 1811, 1812, 1813, 1814, 1815, 1816, 1817, 1818, 1819, 1820, 1821, 1822, 1823, 1824, 1825, 1826, 1827, 1828, 1829, 1830, 1831, 1832, 1833, 1834, 1835, 1836, 1837, 1838, 1839, 1840, 1841, 1842, 1843, 1844, 1845, 1846, 1847, 1848, 1849, 1850, 1851, 1852, 1853, 1854, 1855, 1856, 1857, 1858, 1859, 1860, 1861, 1862, 1863, 1864, 1865, 1866, 1867, 1868, 1869, 1870, 1871, 1872, 1873, 1874, 1875, 1876, 1877, 1878, 1879, 1880, 1881, 1882, 1883, 1884, 1885, 1886, 1887, 1888, 1889, 1890, 1891, 1892, 1893, 1894, 1895, 1896, 1897, 1898, 1899, 1900, 1901, 1902, 1903, 1904, 1905, 1906, 1907, 1908, 1909, 1910, 1911, 1912, 1913, 1914, 1915, 1916, 1917, 1918, 1919, 1920, 1921, 1922, 1923, 1924, 1925, 1926, 1927, 1928, 1929, 1930, 1931, 1932, 1933, 1934, 1935, 1936, 1937, 1938, 1939, 1940, 1941, 1942, 1943, 1944, 1945, 1946, 1947, 1948, 1949, 1950, 1951, 1952, 1953, 1954, 1955, 1956, 1957, 1958, 1959, 1960, 1961, 1962, 1963, 1964, 1965, 1966, 1967, 1968, 1969, 1970, 1971, 1972, 1973, 1974, 1975, 1976, 1977, 1978, 1979, 1980, 1981, 1982, 1983, 1984, 1985, 1986, 1987, 1988, 1989, 1990, 1991, 1992, 1993, 1994, 1995, 1996, 1997, 1998, 1999, 2000, 2001, 2002, 2003, 2004, 2005, 2006, 2007, 2008, 2009, 2010, 2011, 2012, 2013, 2014, 2015, 2016, 2017, 2018, 2019, 2020, 2021, 2022, 2023, 2024, 2025, 2026, 2027, 2028, 2029, 2030, 2031, 2032, 2033, 2034, 2035, 2036, 2037, 2038, 2039, 2040, 2041, 2042, 2043, 2044, 2045, 2046, 2047, 2048, 2049, 2050, 2051, 2052, 2053, 2054, 2055, 2056, 2057, 2058, 2059, 2060, 2061, 2062, 2063, 2064, 2065, 2066, 2067, 2068, 2069, 2070, 2071, 2072, 2073, 2074, 2075, 2076, 2077, 2078, 2079, 2080, 2081, 2082, 2083, 2084, 2085, 2086, 2087, 2088, 2089, 2090, 2091, 2092, 2093, 2094, 2095, 2096, 2097, 2098, 2099, 2100, 2101, 2102, 2103, 2104, 2105, 2106, 2107, 2108, 2109, 2110, 2111, 2112, 2113, 2114, 2115, 2116, 2117, 2118, 2119, 2120, 2121, 2122, 2123, 2124, 2125, 2126, 2127, 2128, 2129, 2130, 2131, 2132, 2133, 2134, 2135, 2136, 2137, 2138, 2139, 2140, 2141, 2142, 2143, 2144, 2145, 2146, 2147, 2148, 2149, 2150, 2151, 2152, 2153, 2154, 2155, 2156, 2157, 2158, 2159, 2160, 2161, 2162, 2163, 2164, 2165, 2166, 2167, 2168, 2169, 2170, 2171, 2172, 2173, 2174, 2175, 2176, 2177, 2178, 2179, 2180, 2181, 2182, 2183, 2184, 2185, 2186, 2187, 2188, 2189, 2190, 2191, 2192, 2193, 2194, 2195, 2196, 2197, 2198, 2199, 2200, 2201, 2202, 2203, 2204, 2205, 2206, 2207, 2208, 2209, 2210, 2211, 2212, 2213, 2214, 2215, 2216, 2217, 2218, 2219, 2220, 2221, 2222, 2223, 2224, 2225, 2226, 2227, 2228, 2229, 2230, 2231, 2232, 2233, 2234, 2235, 2236, 2237, 2238, 2239, 2240, 2241, 2242, 2243, 2244, 2245, 2246, 2247, 2248, 2249, 2250, 2251, 2252, 2253, 2254, 2255, 2256, 2257, 2258, 2259, 2260, 2261, 2262, 2263, 2264, 2265, 2266, 2267, 2268, 2269, 2270, 2271, 2272, 2273, 2274, 2275, 2276, 2277, 2278, 2279, 2280, 2281, 2282, 2283, 2284, 2285, 2286, 2287, 2288, 2289, 2290, 2291, 2292, 2293, 2294, 2295, 2296, 2297, 2298, 2299, 2300, 2301, 2302, 2303, 2304, 2305, 2306, 2307, 2308, 2309, 2310, 2311, 2312, 2313, 2314, 2315, 2316, 2317, 2318, 2319, 2320, 2321, 2322, 2323, 2324, 2325, 2326, 2327, 2328, 2329, 2330, 2331, 2332, 2333, 2334, 2335, 2336, 2337, 2338, 2339, 2340, 2341, 2342, 2343, 2344, 2345, 2346, 2347, 2348, 2349, 2350, 2351, 2352, 2353, 2354, 2355, 2356, 2357, 2358, 2359, 2360, 2361, 2362, 2363, 2364, 2365, 2366, 2367, 2368, 2369, 2370, 2371, 2372, 2373, 2374, 2375, 2376, 2377, 2378, 2379, 2380, 2381, 2382, 2383, 2384, 2385, 2386, 2387, 2388, 2389, 2390, 2391, 2392, 2393, 2394, 2395, 2396, 2397, 2398, 2399, 2400, 2401, 2402, 2403, 2404, 2405, 2406, 2407, 2408, 2409, 2410, 2411, 2412, 2413, 2414, 2415, 2416, 2417, 2418, 2419, 2420, 2421, 2422, 2423, 2424, 2425, 2426, 2427, 2428, 2429, 2430, 2431, 2432, 2433, 2434, 2435, 2436, 2437, 2438, 2439, 2440, 2441, 2442, 2443, 2444, 2445, 2446, 2447, 2448, 2449, 2450, 2451, 2452, 2453, 2454, 2455, 2456, 2457, 2458, 2459, 2460, 2461, 2462, 2463, 2464, 2465, 2466, 2467, 2468, 2469, 2470, 2471, 2472, 2473, 2474, 2475, 2476, 2477, 2478, 2479, 2480, 2481, 2482, 2483, 2484, 2485, 2486, 2487, 2488, 2489, 2490, 2491, 2492, 2493, 2494, 2495, 2496, 2497, 2498, 2499, 2500, 2501, 2502, 2503, 2504, 2505, 2506, 2507, 2508, 2509, 2510, 2511, 2512, 2513, 2514, 2515, 2516, 2517, 2518, 2519, 2520, 2521, 2522, 2523, 2524, 2525, 2526, 2527, 2528, 2529, 2530, 2531, 2532, 2533, 2534, 2535, 2536, 2537, 2538, 2539, 2540, 2541, 2542, 2543, 2544, 2545, 2546, 2547, 2548, 2549, 2550, 2551, 2552, 2553, 2554, 2555, 2556, 2557, 2558, 2559, 2560, 2561, 2562, 2563, 2564, 2565, 2566, 2567, 2568, 2569, 2570, 2571, 2572, 2573, 2574, 2575, 2576, 2577, 2578, 2579, 2580, 2581, 2582, 2583, 2584, 2585, 2586, 2587, 2588, 2589, 2590, 2591, 2592, 2593, 2594, 2595, 2596, 2597, 2598, 2599, 2600, 2601, 2602, 2603, 2604, 2605, 2606, 2607, 2608, 2609, 2610, 2611, 2612, 2613, 2614, 2615, 2616, 2617, 2618, 2619, 2620, 2621, 2622, 2623, 2624, 2625, 2626, 2627, 2628, 2629, 2630, 2631, and 2632.

[0161] The spacer sequence can comprise nucleotide 1 through nucleotide 16 of any one of SEQ ID NOs: 1322-2632. The spacer sequence can comprise nucleotide 1 through nucleotide 17 of any one of SEQ ID NOs: 1322-2632. The spacer sequence can comprise nucleotide 1 through nucleotide 18 of any one of SEQ ID NOs: 1322-2632. The spacer sequence can comprise nucleotide 1 through nucleotide 19 of any one of SEQ ID NOs: 1322-2632. The spacer sequence can comprise nucleotide 1 through nucleotide 20 of any one of SEQ ID NOs: 1322-2632. The spacer sequence can comprise nucleotide 1 through nucleotide 21 of any one of SEQ ID NOs: 1322-2632. The spacer sequence can comprise nucleotide 1 through nucleotide 22 of any one of SEQ ID NOs: 1322-2632. The spacer sequence can comprise nucleotide 1 through nucleotide 23 of any one of SEQ ID NOs: 1322-2632. The spacer sequence can comprise nucleotide 1 through nucleotide 24 of any one of SEQ ID NOs: 1322-2632. The spacer sequence can comprise nucleotide 1 through nucleotide 25 of any one of SEQ ID NOs: 1322-2632. The spacer sequence can comprise nucleotide 1 through nucleotide 26 of any one of SEQ ID NOs: 1322-2632. The spacer sequence can comprise nucleotide 1 through nucleotide 27 of any one of SEQ ID NOs: 1322-2632. The spacer sequence can comprise nucleotide 1 through nucleotide 28 of any one of SEQ ID NOs: 1322-2632. The spacer sequence can comprise nucleotide 1 through nucleotide 29 of any one of SEQ ID NOs: 1322-1425 and 1427-2632. The spacer sequence can comprise nucleotide 1 through nucleotide 30 of any one of SEQ ID NOs: 1322-1425 and 1427-2632.

[0162] In some embodiments, the spacer sequence has or comprises a sequence having at least 90% identity (e.g., at least 90%, 91%, 92%, 93%, 94%, 95%, 96%, 97%, 98% or 99% identity) to a sequence of Table 5 or a portion of a sequence of Table 5. The spacer sequence can have or comprise a sequence having at least 90% identity to a sequence comprising nucleotide 1 through nucleotide 16 of any one of SEQ ID NOs: 1322-2632. The spacer sequence can have or comprise a sequence having at least 90% identity to a sequence comprising nucleotide 1 through nucleotide 17 of any one of SEQ ID NOs: 1322-2632. The spacer sequence can have or comprise a sequence having at least 90% identity to a sequence comprising nucleotide 1 through nucleotide 18 of any one of SEQ ID NOs: 1322-2632. The spacer sequence can have or comprise a sequence having at least 90% identity to a sequence comprising nucleotide 1 through nucleotide 19 of any one of SEQ ID NOs: 1322-2632. The spacer sequence can have or comprise a sequence having at least 90% identity to a sequence comprising nucleotide 1 through nucleotide 20 of any one of SEQ ID NOs: 1322-2632. The spacer sequence can have or comprise a sequence having at least 90% identity to a sequence comprising nucleotide 1 through nucleotide 21 of any one of SEQ ID NOs: 1322-2632. The spacer sequence can have or comprise a sequence having at least 90% identity to a sequence comprising nucleotide 1 through nucleotide 22 of any one of SEQ ID NOs: 1322-2632. The spacer sequence can have or comprise a sequence having at least 90% identity to a sequence comprising nucleotide 1 through nucleotide 23 of any one of SEQ ID NOs: 1322-2632. The spacer sequence can have or comprise a sequence having at least 90% identity to a sequence comprising nucleotide 1 through nucleotide 24 of any one of SEQ ID NOs: 1322-2632. The spacer sequence can have or comprise a sequence having at least 90% identity to a sequence comprising nucleotide 1 through nucleotide 25 of any one of SEQ ID NOs: 1322-2632. The spacer sequence can have or comprise a sequence having at least 90% identity to a sequence comprising nucleotide 1 through nucleotide 26 of any one of SEQ ID NOs: 1322-2632. The spacer sequence can have or comprise a sequence having at least 90% identity to a sequence comprising nucleotide 1 through nucleotide 27 of any one of SEQ ID NOs: 1322-2632. The spacer sequence can have or comprise a sequence having at least 90% identity to a sequence comprising nucleotide 1 through nucleotide 28 of any one of SEQ ID NOs: 1322-2632. The spacer sequence can have or comprise a sequence having at least 90% identity to a sequence comprising nucleotide 1 through nucleotide 29 of any one of SEQ ID NOs: 1322-1425 and 1427-2632. The spacer sequence can have or comprise a sequence having at least 90% identity to a sequence comprising nucleotide 1 through nucleotide 30 of any one of SEQ ID NOs: 1322-1425 and 1427-2632.

TABLE 5
Target and spacer sequences

| | | | SEQ | | SEQ | |
|---|---|---|---|---|---|---|
| | | | ID | | ID | |
| BCL11A | strand | PAM | NO | target sequence | NO | spacer sequence |
| BCL11A_ | − | CTTA | 11 | GACATAACACACCAGGG | 1322 | GACAUAACACACCAGGGUC |
| enhancer_ | | | | TCAATACAACTTT | | AAUACAACUUU |
| region | | | | | | |
| BCL11A_ | − | CTTT | 12 | GAAGCTAGTCTAGTGCA | 1323 | GAAGCUAGUCUAGUGCAAG |
| enhancer_ | | | | AGCTAACAGTTGC | | CUAACAGUUGC |
| region | | | | | | |
| BCL11A_ | − | TTTG | 13 | AAGCTAGTCTAGTGCAA | 1324 | AAGCUAGUCUAGUGCAAGC |
| enhancer_ | | | | GCTAACAGTTGCT | | UAACAGUUGCU |
| region | | | | | | |
| BCL11A_ | − | GTTG | 14 | CTTTTATCACAGGCTCC | 1325 | CUUUUAUCACAGGCUCCAG |
| enhancer_ | | | | AGGAAGGGTTTGG | | GAAGGGUUUGG |
| region | | | | | | |
| BCL11A_ | − | CTTT | 15 | TATCACAGGCTCCAGGA | 1326 | UAUCACAGGCUCCAGGAAG |
| enhancer_ | | | | AGGGTTTGGCCTC | | GGUUUGGCCUC |
| region | | | | | | |
| BCL11A_ | − | TTTA | 16 | TCACAGGCTCCAGGAAG | 1327 | UCACAGGCUCCAGGAAGGG |
| enhancer_ | | | | GGTTTGGCCTCTG | | UUUGGCCUCUG |
| region | | | | | | |
| BCL11A_ | − | GTTT | 17 | GGCCTCTGATTAGGGTG | 1328 | GGCCUCUGAUUAGGGUGGG |
| enhancer_ | | | | GGGGCGTGGGTGG | | GGCGUGGGUGG |
| region | | | | | | |
| BCL11A_ | − | TTTG | 18 | GCCTCTGATTAGGGTGG | 1329 | GCCUCUGAUUAGGGUGGGG |
| enhancer_ | | | | GGGCGTGGGTGGG | | GCGUGGGUGGG |
| region | | | | | | |
| BCL11A_ | − | TTTT | 19 | ATCACAGGCTCCAGGAA | 1330 | AUCACAGGCUCCAGGAAGG |
| enhancer_ | | | | GGGTTTGGCCTCT | | GUUUGGCCUCU |
| region | | | | | | |
| BCL11A_ | + | CTTC | 20 | TACCCCACCCACGCCCC | 1331 | UACCCCACCCACGCCCCCA |
| enhancer_ | | | | CACCCTAATCAGA | | CCCUAAUCAGA |
| region | | | | | | |
| BCL11A_ | + | CTTC | 21 | CTGGAGCCTGTGATAAA | 1332 | CUGGAGCCUGUGAUAAAAG |
| enhancer_ | | | | AGCAACTGTTAGC | | CAACUGUUAGC |
| region | | | | | | |
| BCL11A_ | + | GTTA | 22 | GCTTGCACTAGACTAGC | 1333 | GCUUGCACUAGACUAGCUU |
| enhancer_ | | | | TTCAAAGTTGTAT | | CAAAGUUGUAU |
| region | | | | | | |
| BCL11A_ | + | CTTG | 23 | CACTAGACTAGCTTCAA | 1334 | CACUAGACUAGCUUCAAAG |
| enhancer_ | | | | AGTTGTATTGACC | | UUGUAUUGACC |
| region | | | | | | |
| BCL11A_ | + | CTTC | 24 | AAAGTTGTATTGACCCT | 1335 | AAAGUUGUAUUGACCCUGG |
| enhancer_ | | | | GGTGTGTTATGTC | | UGUGUUAUGUC |
| region | | | | | | |
| BCL11A_ | + | GTTG | 25 | TATTGACCCTGGTGTGT | 1336 | UAUUGACCCUGGUGUGUUA |
| enhancer_ | | | | TATGTCTAAGAGT | | UGUCUAAGAGU |
| region | | | | | | |
| BCL11A_ | + | ATTG | 26 | ACCCTGGTGTGTTATGT | 1337 | ACCCUGGUGUGUUAUGUCU |
| enhancer_ | | | | CTAAGAGTAGATG | | AAGAGUAGAUG |
| region | | | | | | |
| BCL11A_ | − | ATTA | 27 | GGGTGGGGGCGTGGGTG | 1338 | GGGUGGGGGCGUGGGUGGG |
| enhancer_ | | | | GGGTAGAAGAGGA | | GUAGAAGAGGA |
| region | | | | | | |
| BCL11A_ | − | TTTT | 28 | TTTGCTTAAAAAAAAGC | 1339 | UUUGCUUAAAAAAAAGCCA |
| exon_1 | | | | CATGACGGCTCTC | | UGACGGCUCUC |
| BCL11A_ | − | TTTT | 29 | TTTTTTTTTGCTTAAAA | 1340 | UUUUUUUUUGCUUAAAAAA |
| exon 1 | | | | AAAAGCCATGACG | | AAGCCAUGACG |
| BCL11A_ | − | TTTT | 30 | TTTTTTTTGCTTAAAAA | 1341 | UUUUUUUUGCUUAAAAAAA |
| exon_1 | | | | AAAGCCATGACGG | | AGCCAUGACGG |
| BCL11A_ | − | TTTT | 31 | TTTTTTTGCTTAAAAAA | 1342 | UUUUUUUGCUUAAAAAAAA |
| exon_1 | | | | AAGCCATGACGGC | | GCCAUGACGGC |
| BCL11A_ | − | TTTT | 32 | TTTTTTGCTTAAAAAAA | 1343 | UUUUUUGCUUAAAAAAAAG |
| exon_1 | | | | AGCCATGACGGCT | | CCAUGACGGCU |
| BCL11A_ | − | TTTT | 33 | TTTTTGCTTAAAAAAAA | 1344 | UUUUUGCUUAAAAAAAAGC |
| exon_1 | | | | GCCATGACGGCTC | | CAUGACGGCUC |
| BCL11A_ | − | TTTT | 34 | TTTTGCTTAAAAAAAAG | 1345 | UUUUGCUUAAAAAAAAGCC |
| exon_1 | | | | CCATGACGGCTCT | | AUGACGGCUCU |
| BCL11A_ | − | TTTT | 35 | TTGCTTAAAAAAAAGCC | 1346 | UUGCUUAAAAAAAAGCCAU |
| exon_1 | | | | ATGACGGCTCTCC | | GACGGCUCUCC |
| BCL11A_ | + | CTTT | 36 | TGACATCCAAAATAAAT | 1347 | UGACAUCCAAAAUAAAUUA |
| exon_1 | | | | TAGAAATAATACA | | GAAAUAAUACA |
| BCL11A_ | − | TTTT | 37 | GCTTAAAAAAAAGCCAT | 1348 | GCUUAAAAAAAAGCCAUGA |
| exon_1 | | | | GACGGCTCTCCCA | | CGGCUCUCCCA |
| BCL11A_ | − | TTTG | 38 | CTTAAAAAAAAGCCATG | 1349 | CUUAAAAAAAAGCCAUGAC |
| exon_1 | | | | ACGGCTCTCCCAC | | GGCUCUCCCAC |
| BCL11A_ | − | CTTA | 39 | AAAAAAAGCCATGACGG | 1350 | AAAAAAAGCCAUGACGGCU |
| exon_1 | | | | CTCTCCCACAATT | | CUCCCACAAUU |
| BCL11A_ | − | ATTC | 40 | ATCTTCCCTGCGCCATC | 135 | AUCUUCCCUGCGCCAUCUU |
| exon_1 | | | | TTTGTATTATTTC | | UGUAUUAUUUC |
| BCL11A_ | − | CTTC | 41 | CCTGCGCCATCTTTGTA | 1352 | CCUGCGCCAUCUUUGUAUU |
| exon_1 | | | | TTATTTCTAATTT | | AUUUCUAAUUU |
| BCL11A_ | − | CTTT | 42 | GTATTATTTCTAATTTA | 1353 | GUAUUAUUUCUAAUUUAUU |
| exon_1 | | | | TTTTGGATGTCAA | | UUGGAUGUCAA |
| BCL11A_ | − | TTTT | 43 | TTTTTTTTTTGCTTAAA | 1354 | UUUUUUUUUUGCUUAAAAA |
| exon_1 | | | | AAAAAGCCATGAC | | AAAGCCAUGAC |
| BCL11A_ | − | TTTT | 44 | TGCTTAAAAAAAAGCCA | 1355 | UGCUUAAAAAAAAGCCAUG |
| exon 1 | | | | TGACGGCTCTCCC | | ACGGCUCUCCC |
| BCL11A_ | − | TTTT | 45 | TTTTTTTTTTTGCTTAA | 1356 | UUUUUUUUUUUGCUUAAAA |
| exon_1 | | | | AAAAAAGCCATGA | | AAAAGCCAUGA |
| BCL11A_ | − | TTTT | 46 | TTTTTTTTTTTTTTTTT | 1357 | UUUUUUUUUUUUUUUUUUU |
| exon 1 | | | | TTTTTGCTTAAAA | | UUUGCUUAAAA |
| BCL11A_ | − | TTTT | 47 | TTTTTTTTTTTTTGCTT | 1358 | UUUUUUUUUUUUUGCUUAA |
| exon_1 | | | | AAAAAAAAGCCAT | | AAAAAAGCCAU |
| BCL11A_ | − | TTTG | 48 | CCATTTTTTTCATCTCT | 1359 | CCAUUUUUUUCAUCUCUCU |
| exon_1 | | | | CTCTCTCTCTCTC | | CUCUCUCUCUC |
| BCL11A_ | − | ATTT | 49 | TTTTCATCTCTCTCTCT | 1360 | UUUUCAUCUCUCUCUCUCU |
| exon_1 | | | | CTCTCTCCCTCTA | | CUCUCCCUCUA |
| BCL11A_ | − | TTTT | 50 | TTTCATCTCTCTCTCTC | 1361 | UUUCAUCUCUCUCUCUCUC |
| exon_1 | | | | TCTCTCCCTCTAT | | UCUCCCUCUAU |
| BCL11A_ | − | TTTT | 51 | TTCATCTCTCTCTCTCT | 1362 | UUCAUCUCUCUCUCUCUCU |
| exon_1 | | | | CTCTCCCTCTATC | | CUCCCUCUAUC |
| BCL11A_ | − | TTTT | 52 | TCATCTCTCTCTCTCTC | 1363 | UCAUCUCUCUCUCUCUCUC |
| exon_1 | | | | TCTCCCTCTATCT | | UCCCUCUAUCU |
| BCL11A_ | − | TTTT | 53 | CATCTCTCTCTCTCTCT | 1364 | CAUCUCUCUCUCUCUCUCU |
| exon_1 | | | | CTCCCTCTATCTC | | CCCUCUAUCUC |
| BCL11A_ | − | TTTC | 54 | ATCTCTCTCTCTCTCTC | 1365 | AUCUCUCUCUCUCUCUCUC |
| exon_1 | | | | TCCCTCTATCTCT | | CCUCUAUCUCU |
| BCL11A_ | − | CTTC | 55 | TCTCTCTCTCCCTCTTT | 1366 | UCUCUCUCUCCCUCUUUUU |
| exon_1 | | | | TTTTTTTTTTTTT | | UUUUUUUUUUU |
| BCL11A_ | − | TTTG | 56 | TATTATTTCTAATTTAT | 1367 | UAUUAUUUCUAAUUUAUUU |
| exon_1 | | | | TTTGGATGTCAAA | | UGGAUGUCAAA |
| BCL11A_ | − | TTTT | 57 | TTTTTTTTTTTTTTTTT | 1368 | UUUUUUUUUUUUUUUUUUU |
| exon_1 | | | | TTGCTTAAAAAAA | | GCUUAAAAAAA |
| BCL11A_ | − | TTTT | 58 | TTTTTTTTTTTTTTTTT | 1369 | UUUUUUUUUUUUUUUUUUG |
| exon 1 | | | | TGCTTAAAAAAAA | | CUUAAAAAAAA |
| BCL11A_ | − | TTTT | 59 | TTTTTTTTTTTTTTTTT | 1370 | UUUUUUUUUUUUUUUUUGC |
| exon_1 | | | | GCTTAAAAAAAAG | | UUAAAAAAAAG |
| BCL11A_ | − | TTTT | 60 | TTTTTTTTTTTTTTTTG | 1371 | UUUUUUUUUUUUUUUUGCU |
| exon_1 | | | | CTTAAAAAAAAGC | | UAAAAAAAAGC |
| BCL11A_ | − | TTTT | 61 | TTTTTTTTTTTTTTTGC | 1372 | UUUUUUUUUUUUUUUGCUU |
| exon_1 | | | | TTAAAAAAAAGCC | | AAAAAAAAGCC |
| BCL11A_ | − | TTTT | 62 | TTTTTTTTTTTTTTGCT | 1373 | UUUUUUUUUUUUUUGCUUA |
| exon_1 | | | | TAAAAAAAAGCCA | | AAAAAAAGCCA |
| BCL11A_ | − | TTTT | 63 | TTTTTTTTTTTTGCTTA | 1374 | UUUUUUUUUUUUGCUUAAA |
| exon_1 | | | | AAAAAAAGCCATG | | AAAAAGCCAUG |
| BCL11A_ | − | ATTA | 64 | TTTCTAATTTATTTTGG | 1375 | UUUCUAAUUUAUUUUGGAU |
| exon_1 | | | | ATGTCAAAAGGCA | | GUCAAAAGGCA |
| BCL11A_ | − | TTTT | 65 | CTCTGGAGTCTCCTTCT | 1376 | CUCUGGAGUCUCCUUCUUU |
| exon_1 | | | | TTCTAACCCGGCT | | CUAACCCGGCU |
| BCL11A_ | − | TTTC | 66 | TAATTTATTTTGGATGT | 1377 | UAAUUUAUUUUGGAUGUCA |
| exon_1 | | | | CAAAAGGCACTGA | | AAAGGCACUGA |
| BCL11A_ | + | GTTA | 67 | CTTACGCGAGAATTCCC | 1378 | CUUACGCGAGAAUUCCCGU |
| exon_1 | | | | GTTTGCTTAAGTG | | UUGCUUAAGUG |
| BCL11A_ | + | CTTA | 68 | CGCGAGAATTCCCGTTT | 1379 | CGCGAGAAUUCCCGUUUGC |
| exon_1 | | | | GCTTAAGTGCTGG | | UUAAGUGCUGG |
| BCL11A_ | + | ATTC | 69 | CCGTTTGCTTAAGTGCT | 1380 | CCGUUUGCUUAAGUGCUGG |
| exon_1 | | | | GGGGTTTGCCTTG | | GGUUUGCCUUG |
| BCL11A_ | + | GTTT | 70 | GCTTAAGTGCTGGGGTT | 1381 | GCUUAAGUGCUGGGGUUUG |
| exon_1 | | | | TGCCTTGCTTGCG | | CCUUGCUUGCG |
| BCL11A_ | + | TTTG | 71 | CTTAAGTGCTGGGGTTT | 1382 | CUUAAGUGCUGGGGUUUGC |
| exon_1 | | | | GCCTTGCTTGCGG | | CUUGCUUGCGG |
| BCL11A_ | + | CTTA | 72 | AGTGCTGGGGTTTGCCT | 1383 | AGUGCUGGGGUUUGCCUUG |
| exon_1 | | | | TGCTTGCGGCGAG | | CUUGCGGCGAG |
| BCL11A_ | + | GTTT | 73 | GCCTTGCTTGCGGCGAG | 1384 | GCCUUGCUUGCGGCGAGAC |
| exon_1 | | | | ACATGGTGGGCTG | | AUGGUGGGCUG |
| BCL11A_ | + | TTTG | 74 | CCTTGCTTGCGGCGAGA | 1385 | CCUUGCUUGCGGCGAGACA |
| exon_1 | | | | CATGGTGGGCTGC | | UGGUGGGCUGC |
| BCL11A_ | + | CTTG | 75 | CTTGCGGCGAGACATGG | 1386 | CUUGCGGCGAGACAUGGUG |
| exon_1 | | | | TGGGCTGCGGGGC | | GGCUGCGGGGC |
| BCL11A_ | + | CTTG | 76 | CGGCGAGACATGGTGGG | 1387 | CGGCGAGACAUGGUGGGCU |
| exon_1 | | | | CTGCGGGGCGGGC | | GCGGGGCGGGC |
| BCL11A_ | + | GTTC | 77 | ACATCGGGAGAGCCGGG | 1388 | ACAUCGGGAGAGCCGGGUU |
| exon_1 | | | | TTAGAAAGAAGGA | | AGAAAGAAGGA |
| BCL11A_ | + | GTTA | 78 | GAAAGAAGGAGACTCCA | 1389 | GAAAGAAGGAGACUCCAGA |
| exon_1 | | | | GAGAAAATATCTT | | GAAAAUAUCUU |
| BCL11A_ | + | CTTC | 79 | ATCAGTGCCTTTTGACA | 1390 | AUCAGUGCCUUUUGACAUC |
| exon_1 | | | | TCCAAAATAAATT | | CAAAAUAAAUU |
| BCL11A_ | + | ATTG | 80 | TGGGAGAGCCGTCATGG | 1391 | UGGGAGAGCCGUCAUGGCU |
| exon_1 | | | | CTTTTTTTTAAGC | | UUUUUUUAAGC |
| BCL11A_ | + | TTTT | 81 | GACATCCAAAATAAATT | 1392 | GACAUCCAAAAUAAAUUAG |
| exon_1 | | | | AGAAATAATACAA | | AAAUAAUACAA |
| BCL11A_ | + | ATTG | 82 | GGTTACTTACGCGAGAA | 1393 | GGUUACUUACGCGAGAAUU |
| exon_1 | | | | TTCCCGTTTGCTT | | CCCGUUUGCUU |
| BCL11A_ | + | ATTA | 83 | TTGGGTTACTTACGCGA | 1394 | UUGGGUUACUUACGCGAGA |
| exon_1 | | | | GAATTCCCGTTTG | | AUUCCCGUUUG |
| BCL11A_ | + | ATTA | 84 | CTATTATTGGGTTACTT | 1395 | CUAUUAUUGGGUUACUUAC |
| exon_1 | | | | ACGCGAGAATTCC | | GCGAGAAUUCC |
| BCL11A_ | + | ATTA | 85 | TTACTATTATTGGGTTA | 1396 | UUACUAUUAUUGGGUUACU |
| exon_1 | | | | CTTACGCGAGAAT | | UACGCGAGAAU |
| BCL11A_ | − | ATTT | 86 | ATTTTGGATGTCAAAAG | 1397 | AUUUUGGAUGUCAAAAGGC |
| exon_1 | | | | GCACTGATGAAGA | | ACUGAUGAAGA |
| BCL11A_ | − | TTTA | 87 | TTTTGGATGTCAAAAGG | 1398 | UUUUGGAUGUCAAAAGGCA |
| exon 1 | | | | CACTGATGAAGAT | | CUGAUGAAGAU |
| BCL11A_ | − | ATTT | 88 | TGGATGTCAAAAGGCAC | 1399 | UGGAUGUCAAAAGGCACUG |
| exon_1 | | | | TGATGAAGATATT | | AUGAAGAUAUU |
| BCL11A_ | − | TTTT | 89 | GGATGTCAAAAGGCACT | 1400 | GGAUGUCAAAAGGCACUGA |
| exon_1 | | | | GATGAAGATATTT | | UGAAGAUAUUU |
| BCL11A_ | − | TTTG | 90 | GATGTCAAAAGGCACTG | 1401 | GAUGUCAAAAGGCACUGAU |
| exon_1 | | | | ATGAAGATATTTT | | GAAGAUAUUUU |
| BCL11A_ | − | ATTT | 91 | TCTCTGGAGTCTCCTTC | 1402 | UCUCUGGAGUCUCCUUCUU |
| exon_1 | | | | TTTCTAACCCGGC | | UCUAACCCGGC |
| BCL11A_ | − | TTTT | 92 | GCCATTTTTTTCATCTC | 1403 | GCCAUUUUUUUCAUCUCUC |
| exon_1 | | | | TCTCTCTCTCTCT | | UCUCUCUCUCU |
| BCL11A_ | − | ATTT | 93 | CTAATTTATTTTGGATG | 1404 | CUAAUUUAUUUUGGAUGUC |
| exon_1 | | | | TCAAAAGGCACTG | | AAAAGGCACUG |
| BCL11A_ | − | TTTC | 94 | TCTGGAGTCTCCTTCTT | 1405 | UCUGGAGUCUCCUUCUUUC |
| exon_1 | | | | TCTAACCCGGCTC | | UAACCCGGCUC |
| BCL11A_ | − | CTTT | 95 | CTAACCCGGCTCTCCCG | 1406 | CUAACCCGGCUCUCCCGAU |
| exon_1 | | | | ATGTGAACCGAGC | | GUGAACCGAGC |
| BCL11A_ | − | TTTC | 96 | TAACCCGGCTCTCCCGA | 1407 | UAACCCGGCUCUCCCGAUG |
| exon_1 | | | | TGTGAACCGAGCC | | UGAACCGAGCC |
| BCL11A_ | − | CTTA | 97 | AGCAAACGGGAATTCTC | 1408 | AGCAAACGGGAAUUCUCGC |
| exon_1 | | | | GCGTAAGTAACCC | | GUAAGUAACCC |
| BCL11A_ | − | ATTC | 98 | TCGCGTAAGTAACCCAA | 1409 | UCGCGUAAGUAACCCAAUA |
| exon_1 | | | | TAATAGTAATAAT | | AUAGUAAUAAU |
| BCL11A_ | + | ATTA | 99 | TTAATAATTATTATTAC | 1410 | UUAAUAAUUAUUAUUACUA |
| exon_1 | | | | TATTATTGGGTTA | | UUAUUGGGUUA |
| BCL11A_ | + | ATTA | 100 | ATAATTATTATTACTAT | 1411 | AUAAUUAUUAUUACUAUUA |
| exon_1 | | | | TATTGGGTTACTT | | UUGGGUUACUU |
| BCL11A_ | + | ATTA | 101 | TTATTACTATTATTGGG | 1412 | UUAUUACUAUUAUUGGGUU |
| exon_1 | | | | TTACTTACGCGAG | | ACUUACGCGAG |
| BCL11A_ | − | CTTC | 102 | TTTCTAACCCGGCTCTC | 1413 | UUUCUAACCCGGCUCUCCC |
| exon_1 | | | | CCGATGTGAACCG | | GAUGUGAACCG |
| BCL11A_ | − | CTTT | 103 | TGCCATTTTTTTCATCT | 1414 | UGCCAUUUUUUUCAUCUCU |
| exon_1 | | | | CTCTCTCTCTCTC | | CUCUCUCUCUC |
| BCL11A_ | + | ATTA | 104 | GAAATAATACAAAGATG | 1415 | GAAAUAAUACAAAGAUGGC |
| exon_1 | | | | GCGCAGGGAAGAT | | GCAGGGAAGAU |
| BCL11A_ | − | CTTG | 105 | AACTTGCAGCTCAGGGG | 1416 | AACUUGCAGCUCAGGGGGG |
| exon_1 | | | | GGCTTTTGCCATT | | CUUUUGCCAUU |
| BCL11A_ | − | CTTG | 106 | CAGCTCAGGGGGGCTTT | 1417 | CAGCUCAGGGGGGCUUUUG |
| exon_1 | | | | TGCCATTTTTTTC | | CCAUUUUUUUC |
| BCL11A_ | + | TTTT | 107 | TTTTAAGCAAAAAAAAA | 1418 | UUUUAAGCAAAAAAAAAAA |
| exon_1 | | | | AAAAAAAAAAAAA | | AAAAAAAAAAA |
| BCL11A_ | + | TTTT | 108 | TTTAAGCAAAAAAAAAA | 1419 | UUUAAGCAAAAAAAAAAAA |
| exon_1 | | | | AAAAAAAAAAAAA | | AAAAAAAAAAA |
| BCL11A_ | + | TTTT | 109 | TTAAGCAAAAAAAAAAA | 1420 | UUAAGCAAAAAAAAAAAAA |
| exon_1 | | | | AAAAAAAAAAAAA | | AAAAAAAAAAA |
| BCL11A_ | + | TTTT | 110 | TAAGCAAAAAAAAAAAA | 1421 | UAAGCAAAAAAAAAAAAAA |
| exon_1 | | | | AAAAAAAAAAAAA | | AAAAAAAAAAA |
| BCL11A_ | + | TTTG | 111 | ACATCCAAAATAAATTA | 1422 | ACAUCCAAAAUAAAUUAGA |
| exon_1 | | | | GAAATAATACAAA | | AAUAAUACAAA |
| BCL11A_ | + | CTTT | 112 | TTTTTAAGCAAAAAAAA | 1423 | UUUUUAAGCAAAAAAAAAA |
| exon_1 | | | | AAAAAAAAAAAAA | | AAAAAAAAAAA |
| BCL11A_ | + | TTTA | 113 | AGCAAAAAAAAAAAAAA | 1424 | AGCAAAAAAAAAAAAAAAA |
| exon_1 | | | | AAAAAAAAAAAAA | | AAAAAAAAAAA |
| BCL11A_ | + | GTTC | 114 | AAGTGCGGACGTGACGT | 1425 | AAGUGCGGACGUGACGUCC |
| exon_1 | | | | CCCTGCGAACTTG | | CUGCGAACUUG |
| BCL11A_ | + | CTTG | 115 | AACGTCAGGAGTCTGGA | 1426 | AACGUCAGGAGUCUGGAUG |
| exon_1 | | | | TGGACAGAGAC | | GACAGAGAC |
| BCL11A_ | − | GTTC | 116 | AAGTTCGCAGGGACGTC | 1427 | AAGUUCGCAGGGACGUCAC |
| exon_1 | | | | ACGTCCGCACTTG | | GUCCGCACUUG |
| BCL11A_ | + | TTTT | 117 | AAGCAAAAAAAAAAAAA | 1428 | AAGCAAAAAAAAAAAAAAA |
| exon_1 | | | | AAAAAAAAAAAAA | | AAAAAAAAAAA |
| BCL11A_ | − | GTTC | 118 | GCAGGGACGTCACGTCC | 1429 | GCAGGGACGUCACGUCCGC |
| exon_1 | | | | GCACTTGAACTTG | | ACUUGAACUUG |
| BCL11A_ | − | TTTT | 119 | TATCGAGCACAAACGGA | 1430 | UAUCGAGCACAAACGGAAA |
| exon_2 | | | | AACAATGCAATGG | | CAAUGCAAUGG |
| BCL11A_ | − | TTTT | 120 | ATCGAGCACAAACGGAA | 1431 | AUCGAGCACAAACGGAAAC |
| exon 2 | | | | ACAATGCAATGGC | | AAUGCAAUGGC |
| BCL11A_ | − | TTTA | 121 | TCGAGCACAAACGGAAA | 1432 | UCGAGCACAAACGGAAACA |
| exon_2 | | | | CAATGCAATGGCA | | AUGCAAUGGCA |
| BCL11A_ | − | CTTA | 122 | GAAAAAGCTGTGGATAA | 1433 | GAAAAAGCUGUGGAUAAGC |
| exon_2 | | | | GCCACCTTCCCCT | | CACCUUCCCCU |
| BCL11A_ | − | GTTG | 123 | GCATCCAGGTCACGCCA | 1434 | GCAUCCAGGUCACGCCAGA |
| exon 2 | | | | GAGGATGACGATT | | GGAUGACGAUU |
| BCL11A_ | − | CTTC | 124 | ACCAATCGAGATGAAAA | 1435 | ACCAAUCGAGAUGAAAAAA |
| exon 2 | | | | AAGCATCCAATCC | | GCAUCCAAUCC |
| BCL11A_ | − | ATTG | 125 | TTTATCAACGTCATCTA | 1436 | UUUAUCAACGUCAUCUAGA |
| exon_2 | | | | GAGGAATTTGCCC | | GGAAUUUGCCC |
| BCL11A_ | − | GTTT | 126 | ATCAACGTCATCTAGAG | 1437 | AUCAACGUCAUCUAGAGGA |
| exon_2 | | | | GAATTTGCCCCAA | | AUUUGCCCCAA |
| BCL11A_ | − | TTTA | 127 | TCAACGTCATCTAGAGG | 1438 | UCAACGUCAUCUAGAGGAA |
| exon_2 | | | | AATTTGCCCCAAA | | UUUGCCCCAAA |
| BCL11A_ | − | ATTT | 128 | TTATCGAGCACAAACGG | 1439 | UUAUCGAGCACAAACGGAA |
| exon_2 | | | | AAACAATGCAATG | | ACAAUGCAAUG |
| BCL11A_ | − | CTTC | 129 | CCCTTCACCAATCGAGA | 1440 | CCCUUCACCAAUCGAGAUG |
| exon_2 | | | | TGAAAAAAGCATC | | AAAAAAGCAUC |
| BCL11A_ | − | CTTA | 130 | TTTTTATCGAGCACAAA | 1441 | UUUUUAUCGAGCACAAACG |
| exon_2 | | | | CGGAAACAATGCA | | GAAACAAUGCA |
| BCL11A_ | − | CTTG | 131 | AAGCCATTCTTACAGAT | 1442 | AAGCCAUUCUUACAGAUGA |
| exon_2 | | | | GATGAACCAGACC | | UGAACCAGACC |
| BCL11A_ | − | ATTG | 132 | GGGGACATTCTTATTTT | 1443 | GGGGACAUUCUUAUUUUUA |
| exon_2 | | | | TATCGAGCACAAA | | UCGAGCACAAA |
| BCL11A_ | − | CTTC | 133 | CCATTGGGGGACATTCT | 1444 | CCAUUGGGGGACAUUCUUA |
| exon 2 | | | | TATTTTTATCGAG | | UUUUUAUCGAG |
| BCL11A_ | − | GTTG | 134 | GGAGCTCCAGAAGGGGA | 1445 | GGAGCUCCAGAAGGGGAUC |
| exon 2 | | | | TCATGACCTCCTC | | AUGACCUCCUC |
| BCL11A_ | − | CTTA | 135 | CAGATGATGAACCAGAC | 1446 | CAGAUGAUGAACCAGACCA |
| exon 2 | | | | CACGGCCCGTTGG | | CGGCCCGUUGG |
| BCL11A_ | − | ATTC | 136 | TTACAGATGATGAACCA | 1447 | UUACAGAUGAUGAACCAGA |
| exon 2 | | | | GACCACGGCCCGT | | CCACGGCCCGU |
| BCL11A_ | − | TTTC | 137 | TCCAACCACAGCCGAGC | 1448 | UCCAACCACAGCCGAGCCU |
| exon 2 | | | | CTCTTGAAGCCAT | | CUUGAAGCCAU |
| BCL11A_ | − | GTTT | 138 | CTCCAACCACAGCCGAG | 1449 | CUCCAACCACAGCCGAGCC |
| exon_2 | | | | CCTCTTGAAGCCA | | UCUUGAAGCCA |
| BCL11A_ | − | TTTG | 139 | TTTCTCCAACCACAGCC | 1450 | UUUCUCCAACCACAGCCGA |
| exon 2 | | | | GAGCCTCTTGAAG | | GCCUCUUGAAG |
| BCL11A_ | − | TTTT | 140 | GTTTCTCCAACCACAGC | 1451 | GUUUCUCCAACCACAGCCG |
| exon_2 | | | | CGAGCCTCTTGAA | | AGCCUCUUGAA |
| BCL11A_ | − | CTTT | 141 | TGTTTCTCCAACCACAG | 1452 | UGUUUCUCCAACCACAGCC |
| exon_2 | | | | CCGAGCCTCTTGA | | GAGCCUCUUGA |
| BCL11A_ | − | ATTG | 142 | TGCTTTTGTTTCTCCAA | 1453 | UGCUUUUGUUUCUCCAACC |
| exon_2 | | | | CCACAGCCGAGCC | | ACAGCCGAGCC |
| BCL11A_ | − | ATTC | 143 | TTATTTTTATCGAGCAC | 1454 | UUAUUUUUAUCGAGCACAA |
| exon_2 | | | | AAACGGAAACAAT | | ACGGAAACAAU |
| BCL11A_ | − | ATTT | 144 | GCCCCAAACAGGAACAC | 1455 | GCCCCAAACAGGAACACAU |
| exon_2 | | | | ATAGCAGGTAAAT | | AGCAGGUAAAU |
| BCL11A_ | + | CTTT | 145 | TCTCCTTGCTTCTCATT | 1456 | UCUCCUUGCUUCUCAUUUA |
| exon 2 | | | | TACCTGCTATGTG | | CCUGCUAUGUG |
| BCL11A_ | + | TTTT | 146 | CTCCTTGCTTCTCATTT | 1457 | CUCCUUGCUUCUCAUUUAC |
| exon_2 | | | | ACCTGCTATGTGT | | CUGCUAUGUGU |
| BCL11A_ | + | TTTT | 147 | TCTAAGCAGAGGCTGCC | 1458 | UCUAAGCAGAGGCUGCCAU |
| exon 2 | | | | ATTGCATTGTTTC | | UGCAUUGUUUC |
| BCL11A_ | + | TTTT | 148 | CTAAGCAGAGGCTGCCA | 1459 | CUAAGCAGAGGCUGCCAUU |
| exon_2 | | | | TTGCATTGTTTCC | | GCAUUGUUUCC |
| BCL11A_ | + | TTTC | 149 | TAAGCAGAGGCTGCCAT | 1460 | UAAGCAGAGGCUGCCAUUG |
| exon 2 | | | | TGCATTGTTTCCG | | CAUUGUUUCCG |
| BCL11A_ | + | ATTG | 150 | CATTGTTTCCGTTTGTG | 1461 | CAUUGUUUCCGUUUGUGCU |
| exon_2 | | | | CTCGATAAAAATA | | CGAUAAAAAUA |
| BCL11A_ | + | ATTG | 151 | TTTCCGTTTGTGCTCGA | 1462 | UUUCCGUUUGUGCUCGAUA |
| exon 2 | | | | TAAAAATAAGAAT | | AAAAUAAGAAU |
| BCL11A_ | + | GTTT | 152 | CCGTTTGTGCTCGATAA | 1463 | CCGUUUGUGCUCGAUAAAA |
| exon_2 | | | | AAATAAGAATGTC | | AUAAGAAUGUC |
| BCL11A_ | + | CTTT | 153 | TTCTAAGCAGAGGCTGC | 1464 | UUCUAAGCAGAGGCUGCCA |
| exon_2 | | | | CATTGCATTGTTT | | UUGCAUUGUUU |
| BCL11A_ | + | TTTC | 154 | CGTTTGTGCTCGATAAA | 1465 | CGUUUGUGCUCGAUAAAAA |
| exon_2 | | | | AATAAGAATGTCC | | UAAGAAUGUCC |
| BCL11A_ | + | TTTG | 155 | TGCTCGATAAAAATAAG | 1466 | UGCUCGAUAAAAAUAAGAA |
| exon 2 | | | | AATGTCCCCCAAT | | UGUCCCCCAAU |
| BCL11A_ | + | GTTC | 156 | ATCTGGCACTGCCCACA | 1467 | AUCUGGCACUGCCCACAGG |
| exon_2 | | | | GGTGAGGAGGTCA | | UGAGGAGGUCA |
| BCL11A_ | + | GTTC | 157 | ATCATCTGTAAGAATGG | 1468 | AUCAUCUGUAAGAAUGGCU |
| exon 2 | | | | CTTCAAGAGGCTC | | UCAAGAGGCUC |
| BCL11A_ | + | CTTC | 158 | AAGAGGCTCGGCTGTGG | 1469 | AAGAGGCUCGGCUGUGGUU |
| exon_2 | | | | TTGGAGAAACAAA | | GGAGAAACAAA |
| BCL11A_ | + | GTTG | 159 | GAGAAACAAAAGCACAA | 1470 | GAGAAACAAAAGCACAAUU |
| exon 2 | | | | TTATTAGAGTGCC | | AUUAGAGUGCC |
| BCL11A_ | + | ATTA | 160 | TTAGAGTGCCAGAGAGG | 1471 | UUAGAGUGCCAGAGAGGAC |
| exon_2 | | | | ACAGAAAGGGGAG | | AGAAAGGGGAG |
| BCL11A_ | + | GTTT | 161 | GTGCTCGATAAAAATAA | 1472 | GUGCUCGAUAAAAAUAAGA |
| exon_2 | | | | GAATGTCCCCCAA | | AUGUCCCCCAA |
| BCL11A_ | + | CTTA | 162 | TCCACAGCTTTTTCTAA | 1473 | UCCACAGCUUUUUCUAAGC |
| exon_2 | | | | GCAGAGGCTGCCA | | AGAGGCUGCCA |
| BCL11A_ | + | ATTG | 163 | GTGAAGGGGAAGGTGGC | 1474 | GUGAAGGGGAAGGUGGCUU |
| exon 2 | | | | TTATCCACAGCTT | | AUCCACAGCUU |
| BCL11A_ | + | TTTC | 164 | ATCTCGATTGGTGAAGG | 1475 | AUCUCGAUUGGUGAAGGGG |
| exon_2 | | | | GGAAGGTGGCTTA | | AAGGUGGCUUA |
| BCL11A_ | + | TTTC | 165 | TCCTTGCTTCTCATTTA | 1476 | UCCUUGCUUCUCAUUUACC |
| exon_2 | | | | CCTGCTATGTGTT | | UGCUAUGUGUU |
| BCL11A_ | + | CTTG | 166 | CTTCTCATTTACCTGCT | 1477 | CUUCUCAUUUACCUGCUAU |
| exon 2 | | | | ATGTGTTCCTGTT | | GUGUUCCUGUU |
| BCL11A_ | + | CTTC | 167 | TCATTTACCTGCTATGT | 1478 | UCAUUUACCUGCUAUGUGU |
| exon 2 | | | | GTTCCTGTTTGGG | | UCCUGUUUGGG |
| BCL11A_ | + | ATTT | 168 | ACCTGCTATGTGTTCCT | 1479 | ACCUGCUAUGUGUUCCUGU |
| exon_2 | | | | GTTTGGGGCAAAT | | UUGGGGCAAAU |
| BCL11A_ | + | TTTA | 169 | CCTGCTATGTGTTCCTG | 1480 | CCUGCUAUGUGUUCCUGUU |
| exon_2 | | | | TTTGGGGCAAATT | | UGGGGCAAAUU |
| BCL11A_ | + | GTTC | 170 | CTGTTTGGGGCAAATTC | 1481 | CUGUUUGGGGCAAAUUCCU |
| exon_2 | | | | CTCTAGATGACGT | | CUAGAUGACGU |
| BCL11A_ | + | GTTT | 171 | GGGGCAAATTCCTCTAG | 1482 | GGGGCAAAUUCCUCUAGAU |
| exon 2 | | | | ATGACGTTGATAA | | GACGUUGAUAA |
| BCL11A_ | + | TTTG | 172 | GGGCAAATTCCTCTAGA | 1483 | GGGCAAAUUCCUCUAGAUG |
| exon_2 | | | | TGACGTTGATAAA | | ACGUUGAUAAA |
| BCL11A_ | + | ATTC | 173 | CTCTAGATGACGTTGAT | 1484 | CUCUAGAUGACGUUGAUAA |
| exon_2 | | | | AAACAATCGTCAT | | ACAAUCGUCAU |
| BCL11A_ | + | GTTG | 174 | ATAAACAATCGTCATCC | 1485 | AUAAACAAUCGUCAUCCUC |
| exon 2 | | | | TCTGGCGTGACCT | | UGGCGUGACCU |
| BCL11A_ | + | ATTG | 175 | GATGCTTTTTTCATCTC | 1486 | GAUGCUUUUUUCAUCUCGA |
| exon 2 | | | | GATTGGTGAAGGG | | UUGGUGAAGGG |
| BCL11A_ | + | CTTT | 176 | TTTCATCTCGATTGGTG | 1487 | UUUCAUCUCGAUUGGUGAA |
| exon_2 | | | | AAGGGGAAGGTGG | | GGGGAAGGUGG |
| BCL11A_ | + | TTTT | 177 | TTCATCTCGATTGGTGA | 1488 | UUCAUCUCGAUUGGUGAAG |
| exon_2 | | | | AGGGGAAGGTGGC | | GGGAAGGUGGC |
| BCL11A_ | + | TTTT | 178 | TCATCTCGATTGGTGAA | 1489 | UCAUCUCGAUUGGUGAAGG |
| exon 2 | | | | GGGGAAGGTGGCT | | GGAAGGUGGCU |
| BCL11A_ | + | TTTT | 179 | CATCTCGATTGGTGAAG | 1490 | CAUCUCGAUUGGUGAAGGG |
| exon_2 | | | | GGGAAGGTGGCTT | | GAAGGUGGCUU |
| BCL11A_ | − | TTTG | 180 | CCCCAAACAGGAACACA | 1491 | CCCCAAACAGGAACACAUA |
| exon 2 | | | | TAGCAGGTAAATG | | GCAGGUAAAUG |
| BCL11A_ | + | CTTC | 181 | TGGAGCTCCCAACGGGC | 1492 | UGGAGCUCCCAACGGGCCG |
| exon_2 | | | | CGTGGTCTGGTTC | | UGGUCUGGUUC |
| BCL11A_ | − | GTTG | 182 | TTTGTAGCTGTAGTGCT | 1493 | UUUGUAGCUGUAGUGCUUG |
| exon_3 | | | | TGATTTTGGGTTT | | AUUUUGGGUUU |
| BCL11A_ | + | TTTA | 183 | TCTGTGAAAGAAACCCA | 1494 | UCUGUGAAAGAAACCCAAA |
| exon_3 | | | | AAATCAAGCACTA | | AUCAAGCACUA |
| BCL11A_ | − | GTTT | 184 | GTAGCTGTAGTGCTTGA | 1495 | GUAGCUGUAGUGCUUGAUU |
| exon_3 | | | | TTTTGGGTTTCTT | | UUGGGUUUCUU |
| BCL11A_ | − | TTTG | 185 | TAGCTGTAGTGCTTGAT | 1496 | UAGCUGUAGUGCUUGAUUU |
| exon_3 | | | | TTTGGGTTTCTTT | | UGGGUUUCUUU |
| BCL11A_ | − | CTTG | 186 | ATTTTGGGTTTCTTTCA | 1497 | AUUUUGGGUUUCUUUCACA |
| exon_3 | | | | CAGATAAACTTCT | | GAUAAACUUCU |
| BCL11A_ | − | ATTT | 187 | TGGGTTTCTTTCACAGA | 1498 | UGGGUUUCUUUCACAGAUA |
| exon_3 | | | | TAAACTTCTGCAC | | AACUUCUGCAC |
| BCL11A_ | − | TTTT | 188 | GGGTTTCTTTCACAGAT | 1499 | GGGUUUCUUUCACAGAUAA |
| exon_3 | | | | AAACTTCTGCACT | | ACUUCUGCACU |
| BCL11A_ | − | GTTT | 189 | CTTTCACAGATAAACTT | 1500 | CUUUCACAGAUAAACUUCU |
| exon_3 | | | | CTGCACTGGAGGG | | GCACUGGAGGG |
| BCL11A_ | − | TTTC | 190 | TTTCACAGATAAACTTC | 1501 | UUUCACAGAUAAACUUCUG |
| exon_3 | | | | TGCACTGGAGGGG | | CACUGGAGGGG |
| BCL11A_ | − | CTTT | 191 | CACAGATAAACTTCTGC | 1502 | CACAGAUAAACUUCUGCAC |
| exon_3 | | | | ACTGGAGGGGCCT | | UGGAGGGGCCU |
| BCL11A_ | − | TTTC | 192 | ACAGATAAACTTCTGCA | 1503 | ACAGAUAAACUUCUGCACU |
| exon_3 | | | | CTGGAGGGGCCTC | | GGAGGGGCCUC |
| BCL11A_ | − | CTTC | 193 | TGCACTGGAGGGGCCTC | 1504 | UGCACUGGAGGGGCCUCUC |
| exon_3 | | | | TCCTCCCCTCGTT | | CUCCCCUCGUU |
| BCL11A_ | − | GTTC | 194 | TGCACATGGAGCTCTAA | 1505 | UGCACAUGGAGCUCUAAUC |
| exon_3 | | | | TCCCCACGCCTGG | | CCCACGCCUGG |
| BCL11A_ | − | ATTT | 195 | GTAAGTTGAGCCTTATT | 1506 | GUAAGUUGAGCCUUAUUUC |
| exon_3 | | | | TCTTCTACAAATG | | UUCUACAAAUG |
| BCL11A_ | − | TTTG | 196 | GGTTTCTTTCACAGATA | 1507 | GGUUUCUUUCACAGAUAAA |
| exon_3 | | | | AACTTCTGCACTG | | CUUCUGCACUG |
| BCL11A_ | − | GTTG | 197 | AGCCTTATTTCTTCTAC | 1508 | AGCCUUAUUUCUUCUACAA |
| exon_3 | | | | AAATGTCCATGTG | | AUGUCCAUGUG |
| BCL11A_ | − | TTTG | 198 | TAAGTTGAGCCTTATTT | 1509 | UAAGUUGAGCCUUAUUUCU |
| exon_3 | | | | CTTCTACAAATGT | | UCUACAAAUGU |
| BCL11A_ | + | GTTT | 199 | ATCTGTGAAAGAAACCC | 1510 | AUCUGUGAAAGAAACCCAA |
| exon_3 | | | | AAAATCAAGCACT | | AAUCAAGCACU |
| BCL11A_ | + | ATTA | 200 | GAGCTCCATGTGCAGAA | 1511 | GAGCUCCAUGUGCAGAACG |
| exon_3 | | | | CGAGGGGAGGAGA | | AGGGGAGGAGA |
| BCL11A_ | + | ATTC | 201 | TGCACTCATCCCAGGCG | 1512 | UGCACUCAUCCCAGGCGUG |
| exon_3 | | | | TGGGGATTAGAGC | | GGGAUUAGAGC |
| BCL11A_ | + | TTTG | 202 | TAGAAGAAATAAGGCTC | 1513 | UAGAAGAAAUAAGGCUCAA |
| exon_3 | | | | AACTTACAAATAC | | CUUACAAAUAC |
| BCL11A_ | + | CTTA | 203 | CAAATACCCTGCGGGGC | 1514 | CAAAUACCCUGCGGGGCAU |
| exon 3 | | | | ATATTCTGCACTC | | AUUCUGCACUC |
| BCL11A_ | + | ATTT | 204 | GTAGAAGAAATAAGGCT | 1515 | GUAGAAGAAAUAAGGCUCA |
| exon_3 | | | | CAACTTACAAATA | | ACUUACAAAUA |
| BCL11A_ | − | CTTC | 205 | TACAAATGTCCATGTGT | 1516 | UACAAAUGUCCAUGUGUAU |
| exon_3 | | | | ATAGAGATGAGAA | | AGAGAUGAGAA |
| BCL11A_ | − | TTTC | 206 | TTCTACAAATGTCCATG | 1517 | UUCUACAAAUGUCCAUGUG |
| exon_3 | | | | TGTATAGAGATGA | | UAUAGAGAUGA |
| BCL11A_ | − | ATTT | 207 | CTTCTACAAATGTCCAT | 1518 | CUUCUACAAAUGUCCAUGU |
| exon_3 | | | | GTGTATAGAGATG | | GUAUAGAGAUG |
| BCL11A_ | − | CTTA | 208 | TTTCTTCTACAAATGTC | 1519 | UUUCUUCUACAAAUGUCCA |
| exon_3 | | | | CATGTGTATAGAG | | UGUGUAUAGAG |
| BCL11A_ | + | GTTT | 209 | TTTAAAAAAAATTTTTC | 1520 | UUUAAAAAAAAUUUUUCUU |
| exon_4 | | | | TTAACATTTATAT | | AACAUUUAUAU |
| BCL11A_ | + | TTTT | 210 | AAAAAAAATTTTTCTTA | 1521 | AAAAAAAAUUUUUCUUAAC |
| exon_4 | | | | ACATTTATATTTA | | AUUUAUAUUUA |
| BCL11A_ | + | TTTT | 211 | TAAAAAAAATTTTTCTT | 1522 | UAAAAAAAAUUUUUCUUAA |
| exon_4 | | | | AACATTTATATTT | | CAUUUAUAUUU |
| BCL11A_ | + | TTTT | 212 | TTAAAAAAAATTTTTCT | 1523 | UUAAAAAAAAUUUUUCUUA |
| exon_4 | | | | TAACATTTATATT | | ACAUUUAUAUU |
| BCL11A_ | + | TTTA | 213 | AAAAAAATTTTTCTTAA | 1524 | AAAAAAAUUUUUCUUAACA |
| exon_4 | | | | CATTTATATTTAA | | UUUAUAUUUAA |
| BCL11A_ | + | GTTC | 214 | CCCCCTAAACATAATGA | 1525 | CCCCCUAAACAUAAUGAAG |
| exon_4 | | | | AGTGTTTTTTAAA | | UGUUUUUUAAA |
| BCL11A_ | + | TTTC | 215 | CACTACCATTTTTAAAT | 1526 | CACUACCAUUUUUAAAUGG |
| exon_4 | | | | GGATAACAAGTCT | | AUAACAAGUCU |
| BCL11A_ | + | TTTA | 216 | AATGGATAACAAGTCTT | 1527 | AAUGGAUAACAAGUCUUGU |
| exon_4 | | | | GTAACACCACCAA | | AACACCACCAA |
| BCL11A_ | + | TTTT | 217 | AAATGGATAACAAGTCT | 1528 | AAAUGGAUAACAAGUCUUG |
| exon_4 | | | | TGTAACACCACCA | | UAACACCACCA |
| BCL11A_ | + | TTTT | 218 | TAAATGGATAACAAGTC | 1529 | UAAAUGGAUAACAAGUCUU |
| exon_4 | | | | TTGTAACACCACC | | GUAACACCACC |
| BCL11A_ | + | ATTT | 219 | TTAAATGGATAACAAGT | 1530 | UUAAAUGGAUAACAAGUCU |
| exon_4 | | | | CTTGTAACACCAC | | UGUAACACCAC |
| BCL11A_ | + | ATTT | 220 | CCACTACCATTTTTAAA | 1531 | CCACUACCAUUUUUAAAUG |
| exon_4 | | | | TGGATAACAAGTC | | GAUAACAAGUC |
| BCL11A_ | + | ATTT | 221 | TTCTTAACATTTATATT | 1532 | UUCUUAACAUUUAUAUUUA |
| exon_4 | | | | TAAAAAAGTTTTG | | AAAAAGUUUUG |
| BCL11A_ | + | CTTG | 222 | TAACACCACCAAGACAA | 1533 | UAACACCACCAAGACAAUG |
| exon 4 | | | | TGGAACCCTAAAA | | GAACCCUAAAA |
| BCL11A_ | + | TTTT | 223 | TCTTAACATTTATATTT | 1534 | UCUUAACAUUUAUAUUUAA |
| exon_4 | | | | AAAAAAGTTTTGT | | AAAAGUUUUGU |
| BCL11A_ | + | ATTT | 224 | CTATGTTAAGTGTATTC | 1535 | CUAUGUUAAGUGUAUUCUG |
| exon_4 | | | | TGTTTCCATTCAC | | UUUCCAUUCAC |
| BCL11A_ | + | TTTC | 225 | TTAACATTTATATTTAA | 1536 | UUAACAUUUAUAUUUAAAA |
| exon_4 | | | | AAAAGTTTTGTAC | | AAGUUUUGUAC |
| BCL11A_ | + | CTTA | 226 | ACATTTATATTTAAAAA | 1537 | ACAUUUAUAUUUAAAAAAG |
| exon_4 | | | | AGTTTTGTACAAA | | UUUUGUACAAA |
| BCL11A_ | + | ATTT | 227 | ATATTTAAAAAAGTTTT | 1538 | AUAUUUAAAAAAGUUUUGU |
| exon_4 | | | | GTACAAAAAAATC | | ACAAAAAAAUC |
| BCL11A_ | + | TTTA | 228 | TATTTAAAAAAGTTTTG | 1539 | UAUUUAAAAAAGUUUUGUA |
| exon_4 | | | | TACAAAAAAATCC | | CAAAAAAAUCC |
| BCL11A_ | + | ATTT | 229 | AAAAAAGTTTTGTACAA | 1540 | AAAAAAGUUUUGUACAAAA |
| exon_4 | | | | AAAAATCCTTGCA | | AAAUCCUUGCA |
| BCL11A_ | + | TTTA | 230 | AAAAAGTTTTGTACAAA | 1541 | AAAAAGUUUUGUACAAAAA |
| exon 4 | | | | AAAATCCTTGCAC | | AAUCCUUGCAC |
| BCL11A_ | + | GTTT | 231 | TGTACAAAAAAATCCTT | 1542 | UGUACAAAAAAAUCCUUGC |
| exon 4 | | | | GCACTGTAGAAGC | | ACUGUAGAAGC |
| BCL11A_ | + | TTTT | 232 | GTACAAAAAAATCCTTG | 1543 | GUACAAAAAAAUCCUUGCA |
| exon 4 | | | | CACTGTAGAAGCG | | CUGUAGAAGCG |
| BCL11A_ | + | TTTG | 233 | TACAAAAAAATCCTTGC | 1544 | UACAAAAAAAUCCUUGCAC |
| exon 4 | | | | ACTGTAGAAGCGA | | UGUAGAAGCGA |
| BCL11A_ | + | CTTG | 234 | CACTGTAGAAGCGAAAG | 1545 | CACUGUAGAAGCGAAAGCA |
| exon_4 | | | | CAATCATTCATTT | | AUCAUUCAUUU |
| BCL11A_ | + | ATTC | 235 | ATTTCTATGTTAAGTGT | 1546 | AUUUCUAUGUUAAGUGUAU |
| exon_4 | | | | ATTCTGTTTCCAT | | UCUGUUUCCAU |
| BCL11A_ | + | TTTA | 236 | CAACCTGAAGAGCGGTG | 1547 | CAACCUGAAGAGCGGUGUG |
| exon_4 | | | | TGTATCCAAGGCA | | UAUCCAAGGCA |
| BCL11A_ | + | TTTC | 237 | TATGTTAAGTGTATTCT | 1548 | UAUGUUAAGUGUAUUCUGU |
| exon_4 | | | | GTTTCCATTCACA | | UUCCAUUCACA |
| BCL11A_ | + | GTTA | 238 | AGTGTATTCTGTTTCCA | 1549 | AGUGUAUUCUGUUUCCAUU |
| exon_4 | | | | TTCACAGCGCTTG | | CACAGCGCUUG |
| BCL11A_ | + | TTTT | 239 | CTTAACATTTATATTTA | 1550 | CUUAACAUUUAUAUUUAAA |
| exon_4 | | | | AAAAAGTTTTGTA | | AAAGUUUUGUA |
| BCL11A_ | + | TTTT | 240 | ACAACCTGAAGAGCGGT | 1551 | ACAACCUGAAGAGCGGUGU |
| exon_4 | | | | GTGTATCCAAGGC | | GUAUCCAAGGC |
| BCL11A_ | + | TTTA | 241 | AGTACTATATAATCTTA | 1552 | AGUACUAUAUAAUCUUAAA |
| exon_4 | | | | AACCTTTCCCCAA | | CCUUUCCCCAA |
| BCL11A_ | + | TTTT | 242 | TTACAACCTGAAGAGCG | 1553 | UUACAACCUGAAGAGCGGU |
| exon_4 | | | | GTGTGTATCCAAG | | GUGUAUCCAAG |
| BCL11A_ | + | TTTT | 243 | TCCACTACCAAAAAAGG | 1554 | UCCACUACCAAAAAAGGUA |
| exon_4 | | | | TACATTGATACCT | | CAUUGAUACCU |
| BCL11A_ | + | TTTT | 244 | CCACTACCAAAAAAGGT | 1555 | CCACUACCAAAAAAGGUAC |
| exon_4 | | | | ACATTGATACCTT | | AUUGAUACCUU |
| BCL11A_ | + | TTTC | 245 | CACTACCAAAAAAGGTA | 1556 | CACUACCAAAAAAGGUACA |
| exon_4 | | | | CATTGATACCTTT | | UUGAUACCUUU |
| BCL11A_ | + | ATTG | 246 | ATACCTTTTAAGAGAAC | 1557 | AUACCUUUUAAGAGAACAA |
| exon_4 | | | | AAGCAACAGTTAA | | GCAACAGUUAA |
| BCL11A_ | + | CTTT | 247 | TAAGAGAACAAGCAACA | 1558 | UAAGAGAACAAGCAACAGU |
| exon_4 | | | | GTTAAAAATACAA | | UAAAAAUACAA |
| BCL11A_ | + | TTTT | 248 | AAGAGAACAAGCAACAG | 1559 | AAGAGAACAAGCAACAGUU |
| exon_4 | | | | TTAAAAATACAAG | | AAAAAUACAAG |
| BCL11A_ | + | TTTA | 249 | AGAGAACAAGCAACAGT | 1560 | AGAGAACAAGCAACAGUUA |
| exon_4 | | | | TAAAAATACAAGC | | AAAAUACAAGC |
| BCL11A_ | + | GTTA | 250 | AAAATACAAGCTTCAAT | 1561 | AAAAUACAAGCUUCAAUAU |
| exon_4 | | | | ATAAATACTATAG | | AAAUACUAUAG |
| BCL11A_ | + | CTTC | 251 | AATATAAATACTATAGT | 1562 | AAUAUAAAUACUAUAGUGC |
| exon_4 | | | | GCCTAACACTAGA | | CUAACACUAGA |
| BCL11A_ | + | ATTT | 252 | AATTCAAATACCATTCT | 1563 | AAUUCAAAUACCAUUCUAG |
| exon_4 | | | | AGAAATACAGAAA | | AAAUACAGAAA |
| BCL11A_ | + | TTTA | 253 | ATTCAAATACCATTCTA | 1564 | AUUCAAAUACCAUUCUAGA |
| exon 4 | | | | GAAATACAGAAAA | | AAUACAGAAAA |
| BCL11A_ | + | ATTC | 254 | AAATACCATTCTAGAAA | 1565 | AAAUACCAUUCUAGAAAUA |
| exon_4 | | | | TACAGAAAAAAGA | | CAGAAAAAAGA |
| BCL11A_ | + | ATTC | 255 | TAGAAATACAGAAAAAA | 1566 | UAGAAAUACAGAAAAAAGA |
| exon_4 | | | | GACCATAAATGTA | | CCAUAAAUGUA |
| BCL11A_ | + | ATTT | 256 | TAGCATAGGAATCAACA | 1567 | UAGCAUAGGAAUCAACAUG |
| exon_4 | | | | TGAGTGTGCATTT | | AGUGUGCAUUU |
| BCL11A_ | + | TTTT | 257 | AGCATAGGAATCAACAT | 1568 | AGCAUAGGAAUCAACAUGA |
| exon_4 | | | | GAGTGTGCATTTT | | GUGUGCAUUUU |
| BCL11A_ | + | TTTA | 258 | GCATAGGAATCAACATG | 1569 | GCAUAGGAAUCAACAUGAG |
| exon_4 | | | | AGTGTGCATTTTC | | UGUGCAUUUUC |
| BCL11A_ | + | ATTT | 259 | TCCTATATTTAAGTACT | 1570 | UCCUAUAUUUAAGUACUAU |
| exon_4 | | | | ATATAATCTTAAA | | AUAAUCUUAAA |
| BCL11A_ | + | TTTT | 260 | TTTACAACCTGAAGAGC | 1571 | UUUACAACCUGAAGAGCGG |
| exon_4 | | | | GGTGTGTATCCAA | | UGUGUAUCCAA |
| BCL11A_ | + | TTTT | 261 | TTTTACAACCTGAAGAG | 1572 | UUUUACAACCUGAAGAGCG |
| exon 4 | | | | CGGTGTGTATCCA | | GUGUGUAUCCA |
| BCL11A_ | + | TTTT | 262 | TTTTTACAACCTGAAGA | 1573 | UUUUUACAACCUGAAGAGC |
| exon_4 | | | | GCGGTGTGTATCC | | GGUGUGUAUCC |
| BCL11A_ | + | TTTT | 263 | TTTTTTACAACCTGAAG | 1574 | UUUUUUACAACCUGAAGAG |
| exon_4 | | | | AGCGGTGTGTATC | | CGGUGUGUAUC |
| BCL11A_ | + | TTTT | 264 | TTTTTTTACAACCTGAA | 1575 | UUUUUUUACAACCUGAAGA |
| exon_4 | | | | GAGCGGTGTGTAT | | GCGGUGUGUAU |
| BCL11A_ | + | TTTT | 265 | TTTTTTTTACAACCTGA | 1576 | UUUUUUUUACAACCUGAAG |
| exon_4 | | | | AGAGCGGTGTGTA | | AGCGGUGUGUA |
| BCL11A_ | + | TTTT | 266 | TACAACCTGAAGAGCGG | 1577 | UACAACCUGAAGAGCGGUG |
| exon_4 | | | | TGTGTATCCAAGG | | UGUAUCCAAGG |
| BCL11A_ | + | GTTT | 267 | TTTTTTTTTACAACCTG | 1578 | UUUUUUUUUACAACCUGAA |
| exon_4 | | | | AAGAGCGGTGTGT | | GAGCGGUGUGU |
| BCL11A_ | + | CTTT | 268 | CCCCAATGTATGTTTTT | 1579 | CCCCAAUGUAUGUUUUUUU |
| exon_4 | | | | TTTTTTTACAACC | | UUUUUACAACC |
| BCL11A_ | + | CTTA | 269 | AACCTTTCCCCAATGTA | 1580 | AACCUUUCCCCAAUGUAUG |
| exon_4 | | | | TGTTTTTTTTTTT | | UUUUUUUUUUU |
| BCL11A_ | + | ATTC | 270 | TGTTTCCATTCACAGCG | 1581 | UGUUUCCAUUCACAGCGCU |
| exon_4 | | | | CTTGCAATGTTGC | | UGCAAUGUUGC |
| BCL11A_ | + | ATTT | 271 | AAGTACTATATAATCTT | 1582 | AAGUACUAUAUAAUCUUAA |
| exon_4 | | | | AAACCTTTCCCCA | | ACCUUUCCCCA |
| BCL11A_ | + | TTTC | 272 | CTATATTTAAGTACTAT | 1583 | CUAUAUUUAAGUACUAUAU |
| exon_4 | | | | ATAATCTTAAACC | | AAUCUUAAACC |
| BCL11A_ | + | TTTT | 273 | CCTATATTTAAGTACTA | 1584 | CCUAUAUUUAAGUACUAUA |
| exon_4 | | | | TATAATCTTAAAC | | UAAUCUUAAAC |
| BCL11A_ | + | TTTC | 274 | CCCAATGTATGTTTTTT | 1585 | CCCAAUGUAUGUUUUUUUU |
| exon_4 | | | | TTTTTTACAACCT | | UUUUACAACCU |
| BCL11A_ | + | GTTT | 275 | CCATTCACAGCGCTTGC | 1586 | CCAUUCACAGCGCUUGCAA |
| exon_4 | | | | AATGTTGCGTCCA | | UGUUGCGUCCA |
| BCL11A_ | + | TTTT | 276 | TTAGTTTTTAAAAAATG | 1587 | UUAGUUUUUAAAAAAUGCU |
| exon_4 | | | | CTCCTCAATGAGA | | CCUCAAUGAGA |
| BCL11A_ | + | ATTC | 277 | ACAGCGCTTGCAATGTT | 1588 | ACAGCGCUUGCAAUGUUGC |
| exon_4 | | | | GCGTCCAAGTAAG | | GUCCAAGUAAG |
| BCL11A_ | + | ATTG | 278 | TCCTATCTGAGCAGGTT | 1589 | UCCUAUCUGAGCAGGUUUA |
| exon_4 | | | | TATTTTATACTCA | | UUUUAUACUCA |
| BCL11A_ | + | GTTT | 279 | ATTTTATACTCAACCTC | 1590 | AUUUUAUACUCAACCUCUG |
| exon_4 | | | | TGTATCTCTGATT | | UAUCUCUGAUU |
| BCL11A_ | + | TTTA | 280 | TTTTATACTCAACCTCT | 1591 | UUUUAUACUCAACCUCUGU |
| exon 4 | | | | GTATCTCTGATTA | | AUCUCUGAUUA |
| BCL11A_ | + | ATTT | 281 | TATACTCAACCTCTGTA | 1592 | UAUACUCAACCUCUGUAUC |
| exon_4 | | | | TCTCTGATTAGAG | | UCUGAUUAGAG |
| BCL11A_ | + | TTTT | 282 | ATACTCAACCTCTGTAT | 1593 | AUACUCAACCUCUGUAUCU |
| exon 4 | | | | CTCTGATTAGAGA | | CUGAUUAGAGA |
| BCL11A_ | + | TTTA | 283 | TACTCAACCTCTGTATC | 1594 | UACUCAACCUCUGUAUCUC |
| exon_4 | | | | TCTGATTAGAGAA | | UGAUUAGAGAA |
| BCL11A_ | + | ATTA | 284 | GAGAAAAGATACAGATA | 1595 | GAGAAAAGAUACAGAUAUC |
| exon_4 | | | | TCACAGGCAGAGT | | ACAGGCAGAGU |
| BCL11A_ | + | ATTT | 285 | GAACACCAACTGGGGCA | 1596 | GAACACCAACUGGGGCAGA |
| exon 4 | | | | GATGCTAGCTTAA | | UGCUAGCUUAA |
| BCL11A_ | + | TTTG | 286 | AACACCAACTGGGGCAG | 1597 | AACACCAACUGGGGCAGAU |
| exon_4 | | | | ATGCTAGCTTAAT | | GCUAGCUUAAU |
| BCL11A_ | + | CTTA | 287 | ATAAAAAAGAAAAAATT | 1598 | AUAAAAAAGAAAAAAUUAA |
| exon_4 | | | | AAAAAAATAAAAA | | AAAAAUAAAAA |
| BCL11A_ | + | ATTA | 288 | AAAAAATAAAAATAAAA | 1599 | AAAAAAUAAAAAUAAAAAC |
| exon 4 | | | | ACAATGAATCCTC | | AAUGAAUCCUC |
| BCL11A_ | + | CTTC | 289 | CATGTTAACACAAATAG | 1600 | CAUGUUAACACAAAUAGCA |
| exon 4 | | | | CACACAGTGTATG | | CACAGUGUAUG |
| BCL11A_ | + | GTTA | 290 | ACACAAATAGCACACAG | 1601 | ACACAAAUAGCACACAGUG |
| exon 4 | | | | TGTATGGAAAAGA | | UAUGGAAAAGA |
| BCL11A_ | + | CTTT | 291 | TAGGGAGCACAGACATA | 1602 | UAGGGAGCACAGACAUAUA |
| exon_4 | | | | TATACTGCTACTC | | UACUGCUACUC |
| BCL11A_ | + | TTTT | 292 | AGGGAGCACAGACATAT | 1603 | AGGGAGCACAGACAUAUAU |
| exon_4 | | | | ATACTGCTACTCT | | ACUGCUACUCU |
| BCL11A_ | + | TTTA | 293 | GGGAGCACAGACATATA | 1604 | GGGAGCACAGACAUAUAUA |
| exon_4 | | | | TACTGCTACTCTT | | CUGCUACUCUU |
| BCL11A_ | + | CTTA | 294 | AAATTCTTTCTCTTCTT | 1605 | AAAUUCUUUCUCUUCUUUU |
| exon_4 | | | | TTTTTAAGAATGT | | UUUAAGAAUGU |
| BCL11A_ | + | ATTC | 295 | ATAGTTAATCATCATTG | 1606 | AUAGUUAAUCAUCAUUGUA |
| exon_4 | | | | TATCAATATTAGC | | UCAAUAUUAGC |
| BCL11A_ | + | CTTA | 296 | AGAATTCATAGTTAATC | 1607 | AGAAUUCAUAGUUAAUCAU |
| exon_4 | | | | ATCATTGTATCAA | | CAUUGUAUCAA |
| BCL11A_ | + | TTTA | 297 | AATGCAAGTCTTAAGAA | 1608 | AAUGCAAGUCUUAAGAAUU |
| exon 4 | | | | TTCATAGTTAATC | | CAUAGUUAAUC |
| BCL11A_ | + | ATTT | 298 | AAATGCAAGTCTTAAGA | 1609 | AAAUGCAAGUCUUAAGAAU |
| exon 4 | | | | ATTCATAGTTAAT | | UCAUAGUUAAU |
| BCL11A_ | + | TTTA | 299 | AGAATGTCACATTTAAA | 1610 | AGAAUGUCACAUUUAAAUG |
| exon 4 | | | | TGCAAGTCTTAAG | | CAAGUCUUAAG |
| BCL11A_ | + | TTTT | 300 | AAGAATGTCACATTTAA | 1611 | AAGAAUGUCACAUUUAAAU |
| exon 4 | | | | ATGCAAGTCTTAA | | GCAAGUCUUAA |
| BCL11A_ | + | CTTA | 301 | ATTGTCCTATCTGAGCA | 1612 | AUUGUCCUAUCUGAGCAGG |
| exon 4 | | | | GGTTTATTTTATA | | UUUAUUUUAUA |
| BCL11A_ | + | TTTT | 302 | TAAGAATGTCACATTTA | 1613 | UAAGAAUGUCACAUUUAAA |
| exon_4 | | | | AATGCAAGTCTTA | | UGCAAGUCUUA |
| BCL11A_ | + | TTTT | 303 | TTTAAGAATGTCACATT | 1614 | UUUAAGAAUGUCACAUUUA |
| exon_4 | | | | TAAATGCAAGTCT | | AAUGCAAGUCU |
| BCL11A_ | + | CTTT | 304 | TTTTAAGAATGTCACAT | 1615 | UUUUAAGAAUGUCACAUUU |
| exon 4 | | | | TTAAATGCAAGTC | | AAAUGCAAGUC |
| BCL11A_ | + | CTTC | 305 | TTTTTTTAAGAATGTCA | 1616 | UUUUUUUAAGAAUGUCACA |
| exon 4 | | | | CATTTAAATGCAA | | UUUAAAUGCAA |
| BCL11A_ | + | TTTC | 306 | TCTTCTTTTTTTAAGAA | 1617 | UCUUCUUUUUUUAAGAAUG |
| exon_4 | | | | TGTCACATTTAAA | | UCACAUUUAAA |
| BCL11A_ | + | CTTT | 307 | CTCTTCTTTTTTTAAGA | 1618 | CUCUUCUUUUUUUAAGAAU |
| exon_4 | | | | ATGTCACATTTAA | | GUCACAUUUAA |
| BCL11A_ | + | ATTC | 308 | TTTCTCTTCTTTTTTTA | 1619 | UUUCUCUUCUUUUUUUAAG |
| exon_4 | | | | AGAATGTCACATT | | AAUGUCACAUU |
| BCL11A_ | + | TTTT | 309 | TTAAGAATGTCACATTT | 1620 | UUAAGAAUGUCACAUUUAA |
| exon_4 | | | | AAATGCAAGTCTT | | AUGCAAGUCUU |
| BCL11A_ | + | TTTC | 310 | CATTCACAGCGCTTGCA | 1621 | CAUUCACAGCGCUUGCAAU |
| exon_4 | | | | ATGTTGCGTCCAA | | GUUGCGUCCAA |
| BCL11A_ | + | ATTG | 311 | TACAGTGCACTTAATTG | 1622 | UACAGUGCACUUAAUUGUC |
| exon_4 | | | | TCCTATCTGAGCA | | CUAUCUGAGCA |
| BCL11A_ | + | TTTC | 312 | CCTTAAGTATAGACCTG | 1623 | CCUUAAGUAUAGACCUGUA |
| exon_4 | | | | TAAACTGGGAAAA | | AACUGGGAAAA |
| BCL11A_ | + | CTTG | 313 | CAATGTTGCGTCCAAGT | 1624 | CAAUGUUGCGUCCAAGUAA |
| exon_4 | | | | AAGTAAGCTCAAT | | GUAAGCUCAAU |
| BCL11A_ | + | GTTG | 314 | CGTCCAAGTAAGTAAGC | 1625 | CGUCCAAGUAAGUAAGCUC |
| exon_4 | | | | TCAATAGTCAAGT | | AAUAGUCAAGU |
| BCL11A_ | + | GTTT | 315 | TTTTTTTTTTAGTTTTT | 1626 | UUUUUUUUUUAGUUUUUAA |
| exon_4 | | | | AAAAAATGCTCCT | | AAAAUGCUCCU |
| BCL11A_ | + | TTTT | 316 | TTTTTTTTTAGTTTTTA | 1627 | UUUUUUUUUAGUUUUUAAA |
| exon_4 | | | | AAAAATGCTCCTC | | AAAUGCUCCUC |
| BCL11A_ | + | TTTT | 317 | TTTTTTTTAGTTTTTAA | 1628 | UUUUUUUUAGUUUUUAAAA |
| exon_4 | | | | AAAATGCTCCTCA | | AAUGCUCCUCA |
| BCL11A_ | + | TTTT | 318 | TTTTTTTAGTTTTTAAA | 1629 | UUUUUUUAGUUUUUAAAAA |
| exon_4 | | | | AAATGCTCCTCAA | | AUGCUCCUCAA |
| BCL11A_ | + | TTTT | 319 | TTTTTTAGTTTTTAAAA | 1630 | UUUUUUAGUUUUUAAAAAA |
| exon 4 | | | | AATGCTCCTCAAT | | UGCUCCUCAAU |
| BCL11A_ | + | TTTT | 320 | TTTTTAGTTTTTAAAAA | 1631 | UUUUUAGUUUUUAAAAAAU |
| exon_4 | | | | ATGCTCCTCAATG | | GCUCCUCAAUG |
| BCL11A_ | + | TTTT | 321 | TTTTAGTTTTTAAAAAA | 1632 | UUUUAGUUUUUAAAAAAUG |
| exon_4 | | | | TGCTCCTCAATGA | | CUCCUCAAUGA |
| BCL11A_ | + | TTTT | 322 | TTTAGTTTTTAAAAAAT | 1633 | UUUAGUUUUUAAAAAAUGC |
| exon_4 | | | | GCTCCTCAATGAG | | UCCUCAAUGAG |
| BCL11A_ | + | TTTT | 323 | TTCCACTACCAAAAAAG | 1634 | UUCCACUACCAAAAAAGGU |
| exon 4 | | | | GTACATTGATACC | | ACAUUGAUACC |
| BCL11A_ | + | TTTT | 324 | TAGTTTTTAAAAAATGC | 1635 | UAGUUUUUAAAAAAUGCUC |
| exon_4 | | | | TCCTCAATGAGAT | | CUCAAUGAGAU |
| BCL11A_ | + | TTTT | 325 | AGTTTTTAAAAAATGCT | 1636 | AGUUUUUAAAAAAUGCUCC |
| exon 4 | | | | CCTCAATGAGATT | | UCAAUGAGAUU |
| BCL11A_ | + | TTTA | 326 | GTTTTTAAAAAATGCTC | 1637 | GUUUUUAAAAAAUGCUCCU |
| exon_4 | | | | CTCAATGAGATTG | | CAAUGAGAUUG |
| BCL11A_ | + | GTTT | 327 | TTAAAAAATGCTCCTCA | 1638 | UUAAAAAAUGCUCCUCAAU |
| exon_4 | | | | ATGAGATTGTGTT | | GAGAUUGUGUU |
| BCL11A_ | + | TTTT | 328 | TAAAAAATGCTCCTCAA | 1639 | UAAAAAAUGCUCCUCAAUG |
| exon 4 | | | | TGAGATTGTGTTC | | AGAUUGUGUUC |
| BCL11A_ | + | TTTT | 329 | AAAAAATGCTCCTCAAT | 1640 | AAAAAAUGCUCCUCAAUGA |
| exon 4 | | | | GAGATTGTGTTCA | | GAUUGUGUUCA |
| BCL11A_ | + | TTTT | 330 | CCCTTAAGTATAGACCT | 1641 | CCCUUAAGUAUAGACCUGU |
| exon 4 | | | | GTAAACTGGGAAA | | AAACUGGGAAA |
| BCL11A_ | + | CTTT | 331 | TCCCTTAAGTATAGACC | 1642 | UCCCUUAAGUAUAGACCUG |
| exon 4 | | | | TGTAAACTGGGAA | | UAAACUGGGAA |
| BCL11A_ | + | CTTG | 332 | CAACTTTTCCCTTAAGT | 1643 | CAACUUUUCCCUUAAGUAU |
| exon 4 | | | | ATAGACCTGTAAA | | AGACCUGUAAA |
| BCL11A_ | + | ATTC | 333 | TTGCAACTTTTCCCTTA | 1644 | UUGCAACUUUUCCCUUAAG |
| exon 4 | | | | AGTATAGACCTGT | | UAUAGACCUGU |
| BCL11A_ | + | TTTC | 334 | AGCATTCTTGCAACTTT | 1645 | AGCAUUCUUGCAACUUUUC |
| exon_4 | | | | TCCCTTAAGTATA | | CCUUAAGUAUA |
| BCL11A_ | + | TTTT | 335 | CAGCATTCTTGCAACTT | 1646 | CAGCAUUCUUGCAACUUUU |
| exon_4 | | | | TTCCCTTAAGTAT | | CCCUUAAGUAU |
| BCL11A_ | + | CTTA | 336 | AGTATAGACCTGTAAAC | 1647 | AGUAUAGACCUGUAAACUG |
| exon_4 | | | | TGGGAAAATTGTA | | GGAAAAUUGUA |
| BCL11A_ | + | TTTT | 337 | TCAGCATTCTTGCAACT | 1648 | UCAGCAUUCUUGCAACUUU |
| exon_4 | | | | TTTCCCTTAAGTA | | UCCCUUAAGUA |
| BCL11A_ | + | TTTT | 338 | TTTCAGCATTCTTGCAA | 1649 | UUUCAGCAUUCUUGCAACU |
| exon_4 | | | | CTTTTCCCTTAAG | | UUUCCCUUAAG |
| BCL11A_ | + | TTTT | 339 | TTTTCAGCATTCTTGCA | 1650 | UUUUCAGCAUUCUUGCAAC |
| exon 4 | | | | ACTTTTCCCTTAA | | UUUUCCCUUAA |
| BCL11A_ | + | ATTT | 340 | TTTTTCAGCATTCTTGC | 1651 | UUUUUCAGCAUUCUUGCAA |
| exon_4 | | | | AACTTTTCCCTTA | | CUUUUCCCUUA |
| BCL11A_ | + | GTTC | 341 | AATTTTTTTTCAGCATT | 1652 | AAUUUUUUUUCAGCAUUCU |
| exon_4 | | | | CTTGCAACTTTTC | | UGCAACUUUUC |
| BCL11A_ | + | ATTG | 342 | TGTTCAATTTTTTTTCA | 1653 | UGUUCAAUUUUUUUUCAGC |
| exon_4 | | | | GCATTCTTGCAAC | | AUUCUUGCAAC |
| BCL11A_ | + | TTTA | 343 | AAAAATGCTCCTCAATG | 1654 | AAAAAUGCUCCUCAAUGAG |
| exon_4 | | | | AGATTGTGTTCAA | | AUUGUGUUCAA |
| BCL11A_ | + | TTTT | 344 | TTCAGCATTCTTGCAAC | 1655 | UUCAGCAUUCUUGCAACUU |
| exon 4 | | | | TTTTCCCTTAAGT | | UUCCCUUAAGU |
| BCL11A_ | + | TTTT | 345 | TTTCCACTACCAAAAAA | 1656 | UUUCCACUACCAAAAAAGG |
| exon 4 | | | | GGTACATTGATAC | | UACAUUGAUAC |
| BCL11A_ | + | TTTC | 346 | CAATAGAACTTAACAAA | 1657 | CAAUAGAACUUAACAAAGA |
| exon 4 | | | | GACCAGAAACAAA | | CCAGAAACAAA |
| BCL11A_ | + | TTTT | 347 | TTTTTCCACTACCAAAA | 1658 | UUUUUCCACUACCAAAAAA |
| exon 4 | | | | AAGGTACATTGAT | | GGUACAUUGAU |
| BCL11A_ | + | GTTT | 348 | TTCCAATAGAACTTAAC | 1659 | UUCCAAUAGAACUUAACAA |
| exon 4 | | | | AAAGACCAGAAAC | | AGACCAGAAAC |
| BCL11A_ | + | TTTT | 349 | TCCAATAGAACTTAACA | 1660 | UCCAAUAGAACUUAACAAA |
| exon_4 | | | | AAGACCAGAAACA | | GACCAGAAACA |
| BCL11A_ | + | TTTT | 350 | CCAATAGAACTTAACAA | 1661 | CCAAUAGAACUUAACAAAG |
| exon_4 | | | | AGACCAGAAACAA | | ACCAGAAACAA |
| BCL11A_ | + | GTTA | 351 | ATCATCATTGTATCAAT | 1662 | AUCAUCAUUGUAUCAAUAU |
| exon_4 | | | | ATTAGCTTATATA | | UAGCUUAUAUA |
| BCL11A_ | + | CTTA | 352 | ACAAAGACCAGAAACAA | 1663 | ACAAAGACCAGAAACAAAU |
| exon_4 | | | | ATACAATAAAAAG | | ACAAUAAAAAG |
| BCL11A_ | + | GTTG | 353 | TAATGACCTTTGGTCAT | 1664 | UAAUGACCUUUGGUCAUCU |
| exon_4 | | | | CTAAATAAAAAAA | | AAAUAAAAAAA |
| BCL11A_ | + | CTTT | 354 | GGTCATCTAAATAAAAA | 1665 | GGUCAUCUAAAUAAAAAAA |
| exon_4 | | | | AAAAAATAAAAAC | | AAAAUAAAAAC |
| BCL11A_ | + | TTTG | 355 | GTCATCTAAATAAAAAA | 1666 | GUCAUCUAAAUAAAAAAAA |
| exon_4 | | | | AAAAATAAAAACA | | AAAAAAAACA |
| BCL11A_ | + | ATTA | 356 | AGTGCCTCTGTTTTGAA | 1667 | AGUGCCUCUGUUUUGAACA |
| exon_4 | | | | CAGGGCACATAAG | | GGGCACAUAAG |
| BCL11A_ | + | GTTT | 357 | TGAACAGGGCACATAAG | 1668 | UGAACAGGGCACAUAAGCA |
| exon_4 | | | | CAATAATAAATAG | | AUAAUAAAUAG |
| BCL11A_ | + | TTTT | 358 | GAACAGGGCACATAAGC | 1669 | GAACAGGGCACAUAAGCAA |
| exon 4 | | | | AATAATAAATAGT | | UAAUAAAUAGU |
| BCL11A_ | + | TTTG | 359 | AACAGGGCACATAAGCA | 1670 | AACAGGGCACAUAAGCAAU |
| exon_4 | | | | ATAATAAATAGTG | | AAUAAAUAGUG |
| BCL11A_ | + | ATTT | 360 | CAAGTTACGACAAACAG | 1671 | CAAGUUACGACAAACAGCU |
| exon_4 | | | | CTTTCATTACAGG | | UUCAUUACAGG |
| BCL11A_ | + | TTTC | 361 | AAGTTACGACAAACAGC | 1672 | AAGUUACGACAAACAGCUU |
| exon_4 | | | | TTTCATTACAGGA | | UCAUUACAGGA |
| BCL11A_ | + | GTTA | 362 | ATGCAGACAACTGCCAA | 1673 | AUGCAGACAACUGCCAAAA |
| exon_4 | | | | AAAAACACAGACA | | AAACACAGACA |
| BCL11A_ | + | GTTA | 363 | CGACAAACAGCTTTCAT | 1674 | CGACAAACAGCUUUCAUUA |
| exon_4 | | | | TACAGGAATAGAA | | CAGGAAUAGAA |
| BCL11A_ | + | TTTC | 364 | ATTACAGGAATAGAAAA | 1675 | AUUACAGGAAUAGAAAAGG |
| exon_4 | | | | GGCCAATAACAAA | | CCAAUAACAAA |
| BCL11A_ | + | ATTA | 365 | CAGGAATAGAAAAGGCC | 1676 | CAGGAAUAGAAAAGGCCAA |
| exon_4 | | | | AATAACAAAATAT | | UAACAAAAUAU |
| BCL11A_ | + | ATTC | 366 | TGCATTGCCATTTACAA | 1677 | UGCAUUGCCAUUUACAAAA |
| exon 4 | | | | AAAAGTATTGACT | | AAGUAUUGACU |
| BCL11A_ | + | ATTG | 367 | CCATTTACAAAAAAGTA | 1678 | CCAUUUACAAAAAAGUAUU |
| exon 4 | | | | TTGACTAAAGCGG | | GACUAAAGCGG |
| BCL11A_ | + | ATTT | 368 | ACAAAAAAGTATTGACT | 1679 | ACAAAAAAGUAUUGACUAA |
| exon_4 | | | | AAAGCGGGCTTTC | | AGCGGGCUUUC |
| BCL11A_ | + | TTTA | 369 | CAAAAAAGTATTGACTA | 1680 | CAAAAAAGUAUUGACUAAA |
| exon_4 | | | | AAGCGGGCTTTCT | | GCGGGCUUUCU |
| BCL11A_ | + | ATTG | 370 | ACTAAAGCGGGCTTTCT | 1681 | ACUAAAGCGGGCUUUCUCU |
| exon 4 | | | | CTTTAATATGCTT | | UUAAUAUGCUU |
| BCL11A_ | + | CTTT | 371 | CTCTTTAATATGCTTTG | 1682 | CUCUUUAAUAUGCUUUGCA |
| exon_4 | | | | CATATGAAATTCT | | UAUGAAAUUCU |
| BCL11A_ | + | TTTC | 372 | TCTTTAATATGCTTTGC | 1683 | UCUUUAAUAUGCUUUGCAU |
| exon_4 | | | | ATATGAAATTCTT | | AUGAAAUUCUU |
| BCL11A_ | + | CTTT | 373 | AATATGCTTTGCATATG | 1684 | AAUAUGCUUUGCAUAUGAA |
| exon_4 | | | | AAATTCTTTCCAA | | AUUCUUUCCAA |
| BCL11A_ | + | TTTA | 374 | ATATGCTTTGCATATGA | 1685 | AUAUGCUUUGCAUAUGAAA |
| exon 4 | | | | AATTCTTTCCAAT | | UUCUUUCCAAU |
| BCL11A_ | + | CTTT | 375 | GCATATGAAATTCTTTC | 1686 | GCAUAUGAAAUUCUUUCCA |
| exon_4 | | | | CAATCTAAATATA | | AUCUAAAUAUA |
| BCL11A_ | + | TTTG | 376 | CATATGAAATTCTTTCC | 1687 | CAUAUGAAAUUCUUUCCAA |
| exon_4 | | | | AATCTAAATATAA | | UCUAAAUAUAA |
| BCL11A_ | + | ATTC | 377 | TTTCCAATCTAAATATA | 1688 | UUUCCAAUCUAAAUAUAAA |
| exon 4 | | | | AAGCACCATTTAG | | GCACCAUUUAG |
| BCL11A_ | + | CTTT | 378 | CATTACAGGAATAGAAA | 1689 | CAUUACAGGAAUAGAAAAG |
| exon_4 | | | | AGGCCAATAACAA | | GCCAAUAACAA |
| BCL11A_ | + | TTTC | 379 | AATAAAGGGACAAAATG | 1690 | AAUAAAGGGACAAAAUGGG |
| exon_4 | | | | GGTGTATGAACAG | | UGUAUGAACAG |
| BCL11A_ | + | TTTT | 380 | CAATAAAGGGACAAAAT | 1691 | CAAUAAAGGGACAAAAUGG |
| exon_4 | | | | GGGTGTATGAACA | | GUGUAUGAACA |
| BCL11A_ | + | TTTT | 381 | TCAATAAAGGGACAAAA | 1692 | UCAAUAAAGGGACAAAAUG |
| exon_4 | | | | TGGGTGTATGAAC | | GGUGUAUGAAC |
| BCL11A_ | − | TTTT | 382 | GGCAGTTGTCTGCATTA | 1693 | GGCAGUUGUCUGCAUUAAC |
| exon_4 | | | | ACCTGTTCATACA | | CUGUUCAUACA |
| BCL11A_ | − | TTTG | 383 | GCAGTTGTCTGCATTAA | 1694 | GCAGUUGUCUGCAUUAACC |
| exon 4 | | | | CCTGTTCATACAC | | UGUUCAUACAC |
| BCL11A_ | − | GTTG | 384 | TCTGCATTAACCTGTTC | 1695 | UCUGCAUUAACCUGUUCAU |
| exon 4 | | | | ATACACCCATTTT | | ACACCCAUUUU |
| BCL11A_ | − | ATTA | 385 | ACCTGTTCATACACCCA | 1696 | ACCUGUUCAUACACCCAUU |
| exon 4 | | | | TTTTGTCCCTTTA | | UUGUCCCUUUA |
| BCL11A_ | − | GTTC | 386 | ATACACCCATTTTGTCC | 1697 | AUACACCCAUUUUGUCCCU |
| exon 4 | | | | CTTTATTGAAAAA | | UUAUUGAAAAA |
| BCL11A_ | − | ATTT | 387 | TGTCCCTTTATTGAAAA | 1698 | UGUCCCUUUAUUGAAAAAA |
| exon 4 | | | | AATAAAAAAAATT | | UAAAAAAAAUU |
| BCL11A_ | − | TTTT | 388 | GTCCCTTTATTGAAAAA | 1699 | GUCCCUUUAUUGAAAAAAU |
| exon 4 | | | | ATAAAAAAAATTA | | AAAAAAAAUUA |
| BCL11A_ | − | TTTG | 389 | TCCCTTTATTGAAAAAA | 1700 | UCCCUUUAUUGAAAAAAUA |
| exon_4 | | | | TAAAAAAAATTAA | | AAAAAAAUUAA |
| BCL11A_ | − | CTTT | 390 | ATTGAAAAAATAAAAAA | 1701 | AUUGAAAAAAUAAAAAAAA |
| exon_4 | | | | AATTAAAGTACAC | | UUAAAGUACAC |
| BCL11A_ | − | TTTA | 391 | TTGAAAAAATAAAAAAA | 1702 | UUGAAAAAAUAAAAAAAAU |
| exon_4 | | | | ATTAAAGTACACA | | UAAAGUACACA |
| BCL11A_ | − | ATTG | 392 | AAAAAATAAAAAAAATT | 1703 | AAAAAAUAAAAAAAAUUAA |
| exon_4 | | | | AAAGTACACATTG | | AGUACACAUUG |
| BCL11A_ | − | ATTA | 393 | AAGTACACATTGTAAGC | 1704 | AAGUACACAUUGUAAGCUU |
| exon_4 | | | | TTCTTGTGTCCTC | | CUUGUGUCCUC |
| BCL11A_ | − | ATTG | 394 | TAAGCTTCTTGTGTCCT | 1705 | UAAGCUUCUUGUGUCCUCA |
| exon_4 | | | | CATTTGACACACT | | UUUGACACACU |
| BCL11A_ | − | CTTC | 395 | TTGTGTCCTCATTTGAC | 1706 | UUGUGUCCUCAUUUGACAC |
| exon_4 | | | | ACACTCTGTAAAT | | ACUCUGUAAAU |
| BCL11A_ | − | CTTG | 396 | TGTCCTCATTTGACACA | 1707 | UGUCCUCAUUUGACACACU |
| exon_4 | | | | CTCTGTAAATTAC | | CUGUAAAUUAC |
| BCL11A_ | − | ATTT | 397 | GACACACTCTGTAAATT | 1708 | GACACACUCUGUAAAUUAC |
| exon_4 | | | | ACTTGCAAGAAAA | | UUGCAAGAAAA |
| BCL11A_ | − | TTTG | 398 | ACACACTCTGTAAATTA | 1709 | ACACACUCUGUAAAUUACU |
| exon_4 | | | | CTTGCAAGAAAAT | | UGCAAGAAAAU |
| BCL11A_ | + | TTTT | 399 | TTCAATAAAGGGACAAA | 1710 | UUCAAUAAAGGGACAAAAU |
| exon_4 | | | | ATGGGTGTATGAA | | GGGUGUAUGAA |
| BCL11A_ | + | ATTT | 400 | TTTCAATAAAGGGACAA | 1711 | UUUCAAUAAAGGGACAAAA |
| exon_4 | | | | AATGGGTGTATGA | | UGGGUGUAUGA |
| BCL11A_ | + | TTTA | 401 | TTTTTTCAATAAAGGGA | 1712 | UUUUUUCAAUAAAGGGACA |
| exon_4 | | | | CAAAATGGGTGTA | | AAAUGGGUGUA |
| BCL11A_ | + | TTTT | 402 | ATTTTTTCAATAAAGGG | 1713 | AUUUUUUCAAUAAAGGGAC |
| exon_4 | | | | ACAAAATGGGTGT | | AAAAUGGGUGU |
| BCL11A_ | + | TTTT | 403 | TATTTTTTCAATAAAGG | 1714 | UAUUUUUUCAAUAAAGGGA |
| exon_4 | | | | GACAAAATGGGTG | | CAAAAUGGGUG |
| BCL11A_ | + | TTTT | 404 | TTATTTTTTCAATAAAG | 1715 | UUAUUUUUUCAAUAAAGGG |
| exon 4 | | | | GGACAAAATGGGT | | ACAAAAUGGGU |
| BCL11A_ | + | CTTT | 405 | CCAATCTAAATATAAAG | 1716 | CCAAUCUAAAUAUAAAGCA |
| exon 4 | | | | CACCATTTAGTTT | | CCAUUUAGUUU |
| BCL11A_ | + | TTTT | 406 | TTTATTTTTTCAATAAA | 1717 | UUUAUUUUUUCAAUAAAGG |
| exon 4 | | | | GGGACAAAATGGG | | GACAAAAUGGG |
| BCL11A_ | + | ATTT | 407 | TTTTTATTTTTTCAATA | 1718 | UUUUUAUUUUUUCAAUAAA |
| exon_4 | | | | AAGGGACAAAATG | | GGGACAAAAUG |
| BCL11A_ | + | TTTA | 408 | ATTTTTTTTATTTTTTC | 1719 | AUUUUUUUUAUUUUUUCAA |
| exon_4 | | | | AATAAAGGGACAA | | UAAAGGGACAA |
| BCL11A_ | + | CTTT | 409 | AATTTTTTTTATTTTTT | 1720 | AAUUUUUUUUAUUUUUUCA |
| exon_4 | | | | CAATAAAGGGACA | | AUAAAGGGACA |
| BCL11A_ | + | CTTA | 410 | CAATGTGTACTTTAATT | 1721 | CAAUGUGUACUUUAAUUUU |
| exon_4 | | | | TTTTTTATTTTTT | | UUUUAUUUUUU |
| BCL11A_ | + | TTTA | 411 | CAGAGTGTGTCAAATGA | 1722 | CAGAGUGUGUCAAAUGAGG |
| exon_4 | | | | GGACACAAGAAGC | | ACACAAGAAGC |
| BCL11A_ | + | ATTT | 412 | ACAGAGTGTGTCAAATG | 1723 | ACAGAGUGUGUCAAAUGAG |
| exon_4 | | | | AGGACACAAGAAG | | GACACAAGAAG |
| BCL11A_ | + | TTTT | 413 | TTTTATTTTTTCAATAA | 1724 | UUUUAUUUUUUCAAUAAAG |
| exon_4 | | | | AGGGACAAAATGG | | GGACAAAAUGG |
| BCL11A_ | + | TTTC | 414 | CAATCTAAATATAAAGC | 1725 | CAAUCUAAAUAUAAAGCAC |
| exon_4 | | | | ACCATTTAGTTTT | | CAUUUAGUUUU |
| BCL11A_ | + | ATTT | 415 | AGTTTTTGGCAATGAAA | 1726 | AGUUUUUGGCAAUGAAAAA |
| exon_4 | | | | AAAACTGCAAAAC | | AACUGCAAAAC |
| BCL11A_ | + | TTTA | 416 | GTTTTTGGCAATGAAAA | 1727 | GUUUUUGGCAAUGAAAAAA |
| exon 4 | | | | AAACTGCAAAACA | | ACUGCAAAACA |
| BCL11A_ | + | ATTA | 417 | GCTTGCAGTACTGCATA | 1728 | GCUUGCAGUACUGCAUACA |
| exon_4 | | | | CAGTATGGCAGCA | | GUAUGGCAGCA |
| BCL11A_ | + | CTTG | 418 | CAGTACTGCATACAGTA | 1729 | CAGUACUGCAUACAGUAUG |
| exon_4 | | | | TGGCAGCAGGAAA | | GCAGCAGGAAA |
| BCL11A_ | + | ATTC | 419 | TAGCAGGCTCCCCCAAA | 1730 | UAGCAGGCUCCCCCAAACC |
| exon_4 | | | | CCGCCATTATATG | | GCCAUUAUAUG |
| BCL11A_ | + | ATTA | 420 | TATGGCTTCTCATCTGT | 1731 | UAUGGCUUCUCAUCUGUAA |
| exon_4 | | | | AATGTCACACTTT | | UGUCACACUUU |
| BCL11A_ | + | CTTC | 421 | TCATCTGTAATGTCACA | 1732 | UCAUCUGUAAUGUCACACU |
| exon_4 | | | | CTTTTTTGTTTCT | | UUUUUGUUUCU |
| BCL11A_ | + | CTTT | 422 | TTTGTTTCTCTCTTTTT | 1733 | UUUGUUUCUCUCUUUUUUU |
| exon_4 | | | | TTTTTTTTTGAAG | | UUUUUUUGAAG |
| BCL11A_ | + | TTTT | 423 | TTGTTTCTCTCTTTTTT | 1734 | UUGUUUCUCUCUUUUUUUU |
| exon_4 | | | | TTTTTTTTGAAGC | | UUUUUUGAAGC |
| BCL11A_ | + | TTTT | 424 | TGTTTCTCTCTTTTTTT | 1735 | UGUUUCUCUCUUUUUUUUU |
| exon 4 | | | | TTTTTTTGAAGCA | | UUUUUGAAGCA |
| BCL11A_ | + | TTTT | 425 | GTTTCTCTCTTTTTTTT | 1736 | GUUUCUCUCUUUUUUUUUU |
| exon_4 | | | | TTTTTTGAAGCAT | | UUUUGAAGCAU |
| BCL11A_ | + | TTTG | 426 | TTTCTCTCTTTTTTTTT | 1737 | UUUCUCUCUUUUUUUUUUU |
| exon_4 | | | | TTTTTGAAGCATA | | UUUGAAGCAUA |
| BCL11A_ | + | GTTT | 427 | CTCTCTTTTTTTTTTTT | 1738 | CUCUCUUUUUUUUUUUUUU |
| exon_4 | | | | TTGAAGCATACAA | | GAAGCAUACAA |
| BCL11A_ | + | TTTC | 428 | TCTCTTTTTTTTTTTTT | 1739 | UCUCUUUUUUUUUUUUUUG |
| exon_4 | | | | TGAAGCATACAAA | | AAGCAUACAAA |
| BCL11A_ | + | CTTT | 429 | TTTTTTTTTTTGAAGCA | 1740 | UUUUUUUUUUUGAAGCAUA |
| exon_4 | | | | TACAAATAATTTG | | CAAAUAAUUUG |
| BCL11A_ | + | TTTT | 430 | TTTTTTTTTTGAAGCAT | 1741 | UUUUUUUUUUGAAGCAUAC |
| exon_4 | | | | ACAAATAATTTGC | | AAAUAAUUUGC |
| BCL11A_ | + | TTTT | 431 | TTTTTTTTTGAAGCATA | 1742 | UUUUUUUUUGAAGCAUACA |
| exon_4 | | | | CAAATAATTTGCA | | AAUAAUUUGCA |
| BCL11A_ | + | TTTT | 432 | TTTTTTTTGAAGCATAC | 1743 | UUUUUUUUGAAGCAUACAA |
| exon_4 | | | | AAATAATTTGCAC | | AUAAUUUGCAC |
| BCL11A_ | + | TTTT | 433 | TTTTTTTGAAGCATACA | 1744 | UUUUUUUGAAGCAUACAAA |
| exon_4 | | | | AATAATTTGCACT | | UAAUUUGCACU |
| BCL11A_ | + | TTTT | 434 | TTTTTTCCACTACCAAA | 1745 | UUUUUUCCACUACCAAAAA |
| exon_4 | | | | AAAGGTACATTGA | | AGGUACAUUGA |
| BCL11A_ | + | CTTT | 435 | TTTTTTTCCACTACCAA | 1746 | UUUUUUUCCACUACCAAAA |
| exon 4 | | | | AAAAGGTACATTG | | AAGGUACAUUG |
| BCL11A_ | + | ATTA | 436 | AAAAAATATACTGTGGC | 1747 | AAAAAAUAUACUGUGGCAG |
| exon_4 | | | | AGCCTGTCTTTTT | | CCUGUCUUUUU |
| BCL11A_ | + | ATTA | 437 | TCCTGCCAAATTAAAAA | 1748 | UCCUGCCAAAUUAAAAAAA |
| exon 4 | | | | AATATACTGTGGC | | UAUACUGUGGC |
| BCL11A_ | + | TTTG | 438 | CACTATATTATCCTGCC | 1749 | CACUAUAUUAUCCUGCCAA |
| exon 4 | | | | AAATTAAAAAAAT | | AUUAAAAAAAU |
| BCL11A_ | + | ATTT | 439 | GCACTATATTATCCTGC | 1750 | GCACUAUAUUAUCCUGCCA |
| exon 4 | | | | CAAATTAAAAAAA | | AAUUAAAAAAA |
| BCL11A_ | + | GTTA | 440 | TTAGCTTGCAGTACTGC | 1751 | UUAGCUUGCAGUACUGCAU |
| exon_4 | | | | ATACAGTATGGCA | | ACAGUAUGGCA |
| BCL11A_ | + | TTTG | 441 | AAGCATACAAATAATTT | 1752 | AAGCAUACAAAUAAUUUGC |
| exon 4 | | | | GCACTATATTATC | | ACUAUAUUAUC |
| BCL11A_ | + | TTTT | 442 | TGAAGCATACAAATAAT | 1753 | UGAAGCAUACAAAUAAUUU |
| exon_4 | | | | TTGCACTATATTA | | GCACUAUAUUA |
| BCL11A_ | + | TTTT | 443 | TTGAAGCATACAAATAA | 1754 | UUGAAGCAUACAAAUAAUU |
| exon_4 | | | | TTTGCACTATATT | | UGCACUAUAUU |
| BCL11A_ | + | TTTT | 444 | TTTGAAGCATACAAATA | 1755 | UUUGAAGCAUACAAAUAAU |
| exon_4 | | | | ATTTGCACTATAT | | UUGCACUAUAU |
| BCL11A_ | + | TTTT | 445 | TTTTGAAGCATACAAAT | 1756 | UUUUGAAGCAUACAAAUAA |
| exon_4 | | | | AATTTGCACTATA | | UUUGCACUAUA |
| BCL11A_ | + | TTTT | 446 | TTTTTGAAGCATACAAA | 1757 | UUUUUGAAGCAUACAAAUA |
| exon_4 | | | | TAATTTGCACTAT | | AUUUGCACUAU |
| BCL11A_ | + | TTTT | 447 | TTTTTTGAAGCATACAA | 1758 | UUUUUUGAAGCAUACAAAU |
| exon_4 | | | | ATAATTTGCACTA | | AAUUUGCACUA |
| BCL11A_ | + | TTTT | 448 | GAAGCATACAAATAATT | 1759 | GAAGCAUACAAAUAAUUUG |
| exon_4 | | | | TGCACTATATTAT | | CACUAUAUUAU |
| BCL11A_ | + | TTTT | 449 | TTTTCCACTACCAAAAA | 1760 | UUUUCCACUACCAAAAAAG |
| exon_4 | | | | AGGTACATTGATA | | GUACAUUGAUA |
| BCL11A_ | + | TTTA | 450 | CTGCATATGAAGGTAAG | 1761 | CUGCAUAUGAAGGUAAGAU |
| exon_4 | | | | ATGCTGGAATGTA | | GCUGGAAUGUA |
| BCL11A_ | + | CTTT | 451 | TACTGCATATGAAGGTA | 1762 | UACUGCAUAUGAAGGUAAG |
| exon_4 | | | | AGATGCTGGAATG | | AUGCUGGAAUG |
| BCL11A_ | + | GTTT | 452 | TTGGCAATGAAAAAAAC | 1763 | UUGGCAAUGAAAAAAACUG |
| exon_4 | | | | TGCAAAACATTGG | | CAAAACAUUGG |
| BCL11A_ | + | TTTT | 453 | TGGCAATGAAAAAAACT | 1764 | UGGCAAUGAAAAAAACUGC |
| exon_4 | | | | GCAAAACATTGGT | | AAAACAUUGGU |
| BCL11A_ | + | TTTT | 454 | GGCAATGAAAAAAACTG | 1765 | GGCAAUGAAAAAAACUGCA |
| exon_4 | | | | CAAAACATTGGTT | | AAACAUUGGUU |
| BCL11A_ | + | TTTG | 455 | GCAATGAAAAAAACTGC | 1766 | GCAAUGAAAAAAACUGCAA |
| exon_4 | | | | AAAACATTGGTTT | | AACAUUGGUUU |
| BCL11A_ | + | ATTG | 456 | GTTTTTTTTTTTTTTTC | 1767 | GUUUUUUUUUUUCCUUUUU |
| exon_4 | | | | CTTTTTTTTTCTT | | UUUUUUUUCUU |
| BCL11A_ | + | GTTT | 457 | TTTTTTTTTTTTCCTTT | 1768 | UUUUUUUUUUUUCCUUUUU |
| exon_4 | | | | TTTTTTCTTTCTT | | UUUUCUUUCUU |
| BCL11A_ | + | TTTT | 458 | TTTTTTTTTTTCCTTTT | 1769 | UUUUUUUUUUUCCUUUUUU |
| exon_4 | | | | TTTTTCTTTCTTT | | UUUCUUUCUUU |
| BCL11A_ | + | TTTT | 459 | TTTTTTTTTTCCTTTTT | 1770 | UUUUUUUUUUCCUUUUUUU |
| exon_4 | | | | TTTTCTTTCTTTC | | UUCUUUCUUUC |
| BCL11A_ | + | TTTT | 460 | TTTTTTTTTCCTTTTTT | 1771 | UUUUUUUUUCCUUUUUUUU |
| exon_4 | | | | TTTCTTTCTTTCT | | UCUUUCUUUCU |
| BCL11A_ | + | TTTT | 461 | TTTTTTTTCCTTTTTTT | 1772 | UUUUUUUUUUUUCCUUUUU |
| exon_4 | | | | TTCTTTCTTTCTT | | CUUUCUUUCUU |
| BCL11A_ | + | TTTT | 462 | TTTTTTTCCTTTTTTTT | 1773 | UUUUUUUCCUUUUUUUUUC |
| exon_4 | | | | TCTTTCTTTCTTT | | UUUCUUUCUUU |
| BCL11A_ | + | TTTT | 463 | TTTTTTCCTTTTTTTTT | 1774 | UUUUUUCCUUUUUUUUUCU |
| exon_4 | | | | CTTTCTTTCTTTT | | UUCUUUCUUUU |
| BCL11A_ | + | TTTT | 464 | TTTTTCCTTTTTTTTTC | 1775 | UUUUUCCUUUUUUUUUCUU |
| exon 4 | | | | TTTCTTTCTTTTA | | UCUUUCUUUUA |
| BCL11A_ | + | TTTT | 465 | TTTTCCTTTTTTTTTCT | 1776 | UUUUCCUUUUUUUUUCUUU |
| exon_4 | | | | TTCTTTCTTTTAC | | CUUUCUUUUAC |
| BCL11A_ | + | TTTT | 466 | TTTCCTTTTTTTTTCTT | 1777 | UUUCCUUUUUUUUUCUUUC |
| exon_4 | | | | TCTTTCTTTTACT | | UUUCUUUUACU |
| BCL11A_ | + | TTTT | 467 | TTCCTTTTTTTTTCTTT | 1778 | UUCCUUUUUUUUUCUUUCU |
| exon_4 | | | | CTTTCTTTTACTG | | UUCUUUUACUG |
| BCL11A_ | + | TTTT | 468 | TCCTTTTTTTTTCTTTC | 1779 | UCCUUUUUUUUUCUUUCUU |
| exon_4 | | | | TTTCTTTTACTGC | | UCUUUUACUGC |
| BCL11A_ | + | TTTC | 469 | TTTTACTGCATATGAAG | 1780 | UUUUACUGCAUAUGAAGGU |
| exon_4 | | | | GTAAGATGCTGGA | | AAGAUGCUGGA |
| BCL11A_ | + | CTTT | 470 | CTTTTACTGCATATGAA | 1781 | CUUUUACUGCAUAUGAAGG |
| exon 4 | | | | GGTAAGATGCTGG | | UAAGAUGCUGG |
| BCL11A_ | + | TTTC | 471 | TTTCTTTTACTGCATAT | 1782 | UUUCUUUUACUGCAUAUGA |
| exon_4 | | | | GAAGGTAAGATGC | | AGGUAAGAUGC |
| BCL11A_ | + | CTTT | 472 | CTTTCTTTTACTGCATA | 1783 | CUUUCUUUUACUGCAUAUG |
| exon_4 | | | | TGAAGGTAAGATG | | AAGGUAAGAUG |
| BCL11A_ | + | TTTC | 473 | TTTCTTTCTTTTACTGC | 1784 | UUUCUUUCUUUUACUGCAU |
| exon_4 | | | | ATATGAAGGTAAG | | AUGAAGGUAAG |
| BCL11A_ | + | TTTT | 474 | CTTTCTTTCTTTTACTG | 1785 | CUUUCUUUCUUUUACUGCA |
| exon 4 | | | | CATATGAAGGTAA | | UAUGAAGGUAA |
| BCL11A_ | + | TTTT | 475 | ACTGCATATGAAGGTAA | 1786 | ACUGCAUAUGAAGGUAAGA |
| exon_4 | | | | GATGCTGGAATGT | | UGCUGGAAUGU |
| BCL11A_ | + | TTTT | 476 | TCTTTCTTTCTTTTACT | 1787 | UCUUUCUUUCUUUUACUGC |
| exon_4 | | | | GCATATGAAGGTA | | AUAUGAAGGUA |
| BCL11A_ | + | TTTT | 477 | TTTCTTTCTTTCTTTTA | 1788 | UUUCUUUCUUUCUUUUACU |
| exon_4 | | | | CTGCATATGAAGG | | GCAUAUGAAGG |
| BCL11A_ | + | TTTT | 478 | TTTTCTTTCTTTCTTTT | 1789 | UUUUCUUUCUUUCUUUUAC |
| exon_4 | | | | ACTGCATATGAAG | | UGCAUAUGAAG |
| BCL11A_ | + | TTTT | 479 | TTTTTCTTTCTTTCTTT | 1790 | UUUUUCUUUCUUUCUUUUA |
| exon_4 | | | | TACTGCATATGAA | | CUGCAUAUGAA |
| BCL11A_ | + | CTTT | 480 | TTTTTTCTTTCTTTCTT | 1791 | UUUUUUUUUCUUUCUUUU |
| exon_4 | | | | TTACTGCATATGA | | ACUGCAUAUGA |
| BCL11A_ | + | TTTC | 481 | CTTTTTTTTTCTTTCTT | 1792 | CUUUUUUUUUCUUUCUUUC |
| exon_4 | | | | TCTTTTACTGCAT | | UUUUACUGCAU |
| BCL11A_ | + | TTTT | 482 | CCTTTTTTTTTCTTTCT | 1793 | CCUUUUUUUUUCUUUCUUU |
| exon 4 | | | | TTCTTTTACTGCA | | CUUUUACUGCA |
| BCL11A_ | + | TTTT | 483 | TTCTTTCTTTCTTTTAC | 1794 | UUCUUUCUUUCUUUUACUG |
| exon 4 | | | | TGCATATGAAGGT | | CAUAUGAAGGU |
| BCL11A_ | + | ATTG | 484 | TATCAATATTAGCTTAT | 1795 | UAUCAAUAUUAGCUUAUAU |
| exon 4 | | | | ATACCTGTTCTAG | | ACCUGUUCUAG |
| BCL11A_ | + | ATTC | 485 | AAGGCCTTTTTTCTTCC | 1796 | AAGGCCUUUUUUCUUCCUU |
| exon 4 | | | | TTTCCAATTGATA | | UCCAAUUGAUA |
| BCL11A_ | + | CTTA | 486 | TATACCTGTTCTAGTTT | 1797 | UAUACCUGUUCUAGUUUUA |
| exon_4 | | | | TAAATGGCAAATA | | AAUGGCAAAUA |
| BCL11A_ | + | TTTC | 487 | ATGTGTTTCTCCAGGGT | 1798 | AUGUGUUUCUCCAGGGUAC |
| exon_4 | | | | ACTGTACACGCTA | | UGUACACGCUA |
| BCL11A_ | + | GTTT | 488 | CTCCAGGGTACTGTACA | 1799 | CUCCAGGGUACUGUACACG |
| exon_4 | | | | CGCTAAAAGGCAT | | CUAAAAGGCAU |
| BCL11A_ | + | TTTC | 489 | TCCAGGGTACTGTACAC | 1800 | UCCAGGGUACUGUACACGC |
| exon_4 | | | | GCTAAAAGGCATC | | UAAAAGGCAUC |
| BCL11A_ | + | CTTA | 490 | CAAATTTCACATTTGTA | 1801 | CAAAUUUCACAUUUGUAAA |
| exon_4 | | | | AACGTCCTTCCCC | | CGUCCUUCCCC |
| BCL11A_ | + | ATTT | 491 | CACATTTGTAAACGTCC | 1802 | CACAUUUGUAAACGUCCUU |
| exon_4 | | | | TTCCCCACCTGGC | | CCCCACCUGGC |
| BCL11A_ | + | TTTC | 492 | ACATTTGTAAACGTCCT | 1803 | ACAUUUGUAAACGUCCUUC |
| exon_4 | | | | TCCCCACCTGGCC | | CCCACCUGGCC |
| BCL11A_ | + | ATTT | 493 | GTAAACGTCCTTCCCCA | 1804 | GUAAACGUCCUUCCCCACC |
| exon 4 | | | | CCTGGCCATGCGT | | UGGCCAUGCGU |
| BCL11A_ | + | TTTG | 494 | TAAACGTCCTTCCCCAC | 1805 | UAAACGUCCUUCCCCACCU |
| exon_4 | | | | CTGGCCATGCGTT | | GGCCAUGCGUU |
| BCL11A_ | + | CTTC | 495 | CCCACCTGGCCATGCGT | 1806 | CCCACCUGGCCAUGCGUUU |
| exon 4 | | | | TTTCATGTGCCTG | | UCAUGUGCCUG |
| BCL11A_ | + | GTTT | 496 | TCATGTGCCTGGTGAGC | 1807 | UCAUGUGCCUGGUGAGCUU |
| exon_4 | | | | TTGCTACTCTGGG | | GCUACUCUGGG |
| BCL11A_ | + | TTTT | 497 | CATGTGCCTGGTGAGCT | 1808 | CAUGUGCCUGGUGAGCUUG |
| exon_4 | | | | TGCTACTCTGGGC | | CUACUCUGGGC |
| BCL11A_ | + | TTTC | 498 | ATGTGCCTGGTGAGCTT | 1809 | AUGUGCCUGGUGAGCUUGC |
| exon_4 | | | | GCTACTCTGGGCA | | UACUCUGGGCA |
| BCL11A_ | + | CTTG | 499 | CTACTCTGGGCACAGGC | 1810 | CUACUCUGGGCACAGGCAU |
| exon 4 | | | | ATAGTTGCACAGC | | AGUUGCACAGC |
| BCL11A_ | + | GTTG | 500 | CACAGCTCGCATTTATA | 1811 | CACAGCUCGCAUUUAUAAG |
| exon_4 | | | | AGGCCTTTCGCCC | | GCCUUUCGCCC |
| BCL11A_ | + | TTTT | 501 | CATGTGTTTCTCCAGGG | 1812 | CAUGUGUUUCUCCAGGGUA |
| exon_4 | | | | TACTGTACACGCT | | CUGUACACGCU |
| BCL11A_ | + | ATTT | 502 | ATAAGGCCTTTCGCCCG | 1813 | AUAAGGCCUUUCGCCCGUG |
| exon_4 | | | | TGTGGCTTCTCCT | | UGGCUUCUCCU |
| BCL11A_ | + | CTTT | 503 | CGCCCGTGTGGCTTCTC | 1814 | CGCCCGUGUGGCUUCUCCU |
| exon_4 | | | | CTGTGGACAGTGA | | GUGGACAGUGA |
| BCL11A_ | + | TTTC | 504 | GCCCGTGTGGCTTCTCC | 1815 | GCCCGUGUGGCUUCUCCUG |
| exon 4 | | | | TGTGGACAGTGAG | | UGGACAGUGAG |
| BCL11A_ | + | CTTC | 505 | TCCTGTGGACAGTGAGA | 1816 | UCCUGUGGACAGUGAGAUU |
| exon_4 | | | | TTGCTACAGTTCT | | GCUACAGUUCU |
| BCL11A_ | + | ATTG | 506 | CTACAGTTCTTGAAGAC | 1817 | CUACAGUUCUUGAAGACUU |
| exon_4 | | | | TTTCCCACAGTAC | | UCCCACAGUAC |
| BCL11A_ | + | GTTC | 507 | TTGAAGACTTTCCCACA | 1818 | UUGAAGACUUUCCCACAGU |
| exon_4 | | | | GTACTCACAAGTG | | ACUCACAAGUG |
| BCL11A_ | + | CTTG | 508 | AAGACTTTCCCACAGTA | 1819 | AAGACUUUCCCACAGUACU |
| exon 4 | | | | CTCACAAGTGTCG | | CACAAGUGUCG |
| BCL11A_ | + | CTTT | 509 | CCCACAGTACTCACAAG | 1820 | CCCACAGUACUCACAAGUG |
| exon_4 | | | | TGTCGCTGCGTCT | | UCGCUGCGUCU |
| BCL11A_ | + | TTTC | 510 | CCACAGTACTCACAAGT | 1821 | CCACAGUACUCACAAGUGU |
| exon_4 | | | | GTCGCTGCGTCTG | | CGCUGCGUCUG |
| BCL11A_ | + | CTTT | 511 | TGAGCTGGGCCTGCCCG | 1822 | UGAGCUGGGCCUGCCCGGG |
| exon_4 | | | | GGCCCGGACCACT | | CCCGGACCACU |
| BCL11A_ | + | TTTT | 512 | GAGCTGGGCCTGCCCGG | 1823 | GAGCUGGGCCUGCCCGGGC |
| exon_4 | | | | GCCCGGACCACTA | | CCGGACCACUA |
| BCL11A_ | + | TTTG | 513 | AGCTGGGCCTGCCCGGG | 1824 | AGCUGGGCCUGCCCGGGCC |
| exon 4 | | | | CCCGGACCACTAA | | CGGACCACUAA |
| BCL11A_ | + | CTTC | 514 | CCGTGCCGCTGCGCCCC | 1825 | CCGUGCCGCUGCGCCCCGA |
| exon 4 | | | | GAGATCCCTCCGT | | GAUCCCUCCGU |
| BCL11A_ | + | GTTC | 515 | TCCGAGGAGTGCTCCGA | 1826 | UCCGAGGAGUGCUCCGACG |
| exon_4 | | | | CGAGGAGGCAAAA | | AGGAGGCAAAA |
| BCL11A_ | + | ATTG | 516 | TCTGGAGTCTCCGAAGC | 1827 | UCUGGAGUCUCCGAAGCUA |
| exon_4 | | | | TAAGGAAGGGATC | | AGGAAGGGAUC |
| BCL11A_ | + | TTTA | 517 | TAAGGCCTTTCGCCCGT | 1828 | UAAGGCCUUUCGCCCGUGU |
| exon_4 | | | | GTGGCTTCTCCTG | | GGCUUCUCCUG |
| BCL11A_ | + | TTTT | 518 | TCATGTGTTTCTCCAGG | 1829 | UCAUGUGUUUCUCCAGGGU |
| exon_4 | | | | GTACTGTACACGC | | ACUGUACACGC |
| BCL11A_ | + | TTTT | 519 | TTCATGTGTTTCTCCAG | 1830 | UUCAUGUGUUUCUCCAGGG |
| exon_4 | | | | GGTACTGTACACG | | UACUGUACACG |
| BCL11A_ | + | ATTT | 520 | TTTCATGTGTTTCTCCA | 1831 | UUUCAUGUGUUUCUCCAGG |
| exon_4 | | | | GGGTACTGTACAC | | GUACUGUACAC |
| BCL11A_ | + | GTTT | 521 | AAAAAAAAACATACACA | 1832 | AAAAAAAAACAUACACAAC |
| exon_4 | | | | ACATGTAAATTAT | | AUGUAAAUUAU |
| BCL11A_ | + | TTTA | 522 | AAAAAAAACATACACAA | 1833 | AAAAAAAACAUACACAACA |
| exon 4 | | | | CATGTAAATTATT | | UGUAAAUUAUU |
| BCL11A_ | + | ATTA | 523 | TTGCACAAGAGAAAGGC | 1834 | UUGCACAAGAGAAAGGCUC |
| exon_4 | | | | TCAAAGTTTGCGT | | AAAGUUUGCGU |
| BCL11A_ | + | ATTG | 524 | CACAAGAGAAAGGCTCA | 1835 | CACAAGAGAAAGGCUCAAA |
| exon_4 | | | | AAGTTTGCGTAAA | | GUUUGCGUAAA |
| BCL11A_ | + | GTTT | 525 | GCGTAAAATGCAATAGT | 1836 | GCGUAAAAUGCAAUAGUAU |
| exon_4 | | | | ATTGCCCCATACA | | UGCCCCAUACA |
| BCL11A_ | + | TTTG | 526 | CGTAAAATGCAATAGTA | 1837 | CGUAAAAUGCAAUAGUAUU |
| exon_4 | | | | TTGCCCCATACAG | | GCCCCAUACAG |
| BCL11A_ | + | ATTG | 527 | CCCCATACAGATCATGC | 1838 | CCCCAUACAGAUCAUGCAU |
| exon 4 | | | | ATTCAAACGGTGA | | UCAAACGGUGA |
| BCL11A_ | + | ATTC | 528 | AAACGGTGAGAACATAA | 1839 | AAACGGUGAGAACAUAAAG |
| exon_4 | | | | AGGAAAAAAAAAA | | GAAAAAAAAAA |
| BCL11A_ | + | ATTC | 529 | TTAGCTTCGTTACTTCT | 1840 | UUAGCUUCGUUACUUCUGU |
| exon_4 | | | | GTTTGTTTGTTTG | | UUGUUUGUUUG |
| BCL11A_ | + | CTTA | 530 | GCTTCGTTACTTCTGTT | 1841 | GCUUCGUUACUUCUGUUUG |
| exon_4 | | | | TGTTTGTTTGTTT | | UUUGUUUGUUU |
| BCL11A_ | + | CTTC | 531 | GTTACTTCTGTTTGTTT | 1842 | GUUACUUCUGUUUGUUUGU |
| exon_4 | | | | GTTTGTTTGTTTA | | UUGUUUGUUUA |
| BCL11A_ | + | GTTA | 532 | CTTCTGTTTGTTTGTTT | 1843 | CUUCUGUUUGUUUGUUUGU |
| exon_4 | | | | GTTTGTTTAAATC | | UUGUUUAAAUC |
| BCL11A_ | + | CTTC | 533 | TGTTTGTTTGTTTGTTT | 1844 | UGUUUGUUUGUUUGUUUGU |
| exon_4 | | | | GTTTAAATCACAT | | UUAAAUCACAU |
| BCL11A_ | + | GTTT | 534 | GTTTGTTTGTTTGTTTA | 1845 | GUUUGUUUGUUUGUUUAAA |
| exon_4 | | | | AATCACATGGGAC | | UCACAUGGGAC |
| BCL11A_ | + | TTTG | 535 | TTTGTTTGTTTGTTTAA | 1846 | UUUGUUUGUUUGUUUAAAU |
| exon_4 | | | | ATCACATGGGACT | | CACAUGGGACU |
| BCL11A_ | + | GTTT | 536 | GTTTGTTTGTTTAAATC | 1847 | GUUUGUUUGUUUAAAUCAC |
| exon_4 | | | | ACATGGGACTAGA | | AUGGGACUAGA |
| BCL11A_ | + | TTTG | 537 | TTTGTTTGTTTAAATCA | 1848 | UUUGUUUGUUUAAAUCACA |
| exon_4 | | | | CATGGGACTAGAA | | UGGGACUAGAA |
| BCL11A_ | + | ATTC | 538 | AACACTCGATCACTGTG | 1849 | AACACUCGAUCACUGUGCC |
| exon_4 | | | | CCATTTTTTCATG | | AUUUUUUCAUG |
| BCL11A_ | + | ATTA | 539 | TTCAACACTCGATCACT | 1850 | UUCAACACUCGAUCACUGU |
| exon_4 | | | | GTGCCATTTTTTC | | GCCAUUUUUUC |
| BCL11A_ | + | TTTA | 540 | TATCATTATTCAACACT | 1851 | UAUCAUUAUUCAACACUCG |
| exon_4 | | | | CGATCACTGTGCC | | AUCACUGUGCC |
| BCL11A_ | + | TTTT | 541 | ATATCATTATTCAACAC | 1852 | AUAUCAUUAUUCAACACUC |
| exon 4 | | | | TCGATCACTGTGC | | GAUCACUGUGC |
| BCL11A_ | + | TTTT | 542 | TATATCATTATTCAACA | 1853 | UAUAUCAUUAUUCAACACU |
| exon_4 | | | | CTCGATCACTGTG | | CGAUCACUGUG |
| BCL11A_ | + | GTTT | 543 | TTATATCATTATTCAAC | 1854 | UUAUAUCAUUAUUCAACAC |
| exon 4 | | | | ACTCGATCACTGT | | UCGAUCACUGU |
| BCL11A_ | + | CTTT | 544 | GAGCTGCCTGGAGGCCG | 1855 | GAGCUGCCUGGAGGCCGCG |
| exon_4 | | | | CGTAGCCGGCGAG | | UAGCCGGCGAG |
| BCL11A_ | + | ATTC | 545 | AGTTTTTATATCATTAT | 1856 | AGUUUUUAUAUCAUUAUUC |
| exon_4 | | | | TCAACACTCGATC | | AACACUCGAUC |
| BCL11A_ | + | TTTA | 546 | AATCACATGGGACTAGA | 1857 | AAUCACAUGGGACUAGAAA |
| exon_4 | | | | AAAAAATCCTACA | | AAAAUCCUACA |
| BCL11A_ | + | GTTT | 547 | AAATCACATGGGACTAG | 1858 | AAAUCACAUGGGACUAGAA |
| exon_4 | | | | AAAAAAATCCTAC | | AAAAAUCCUAC |
| BCL11A_ | + | TTTG | 548 | TTTAAATCACATGGGAC | 1859 | UUUAAAUCACAUGGGACUA |
| exon_4 | | | | TAGAAAAAAATCC | | GAAAAAAAUCC |
| BCL11A_ | − | GTTT | 549 | GTTTAAATCACATGGGA | 1860 | GUUUAAAUCACAUGGGACU |
| exon_4 | | | | CTAGAAAAAAATC | | AGAAAAAAAUC |
| BCL11A_ | + | TTTG | 550 | TTTGTTTAAATCACATG | 1861 | UUUGUUUAAAUCACAUGGG |
| exon 4 | | | | GGACTAGAAAAAA | | ACUAGAAAAAA |
| BCL11A_ | + | GTTT | 551 | GTTTGTTTAAATCACAT | 1862 | GUUUGUUUAAAUCACAUGG |
| exon 4 | | | | GGGACTAGAAAAA | | GACUAGAAAAA |
| BCL11A_ | + | ATTA | 552 | ATATACCTCTATTCAGT | 1863 | AUAUACCUCUAUUCAGUUU |
| exon_4 | | | | TTTTATATCATTA | | UUAUAUCAUUA |
| BCL11A_ | + | TTTG | 553 | AGCTGCCTGGAGGCCGC | 1864 | AGCUGCCUGGAGGCCGCGU |
| exon 4 | | | | GTAGCCGGCGAGC | | AGCCGGCGAGC |
| BCL11A_ | + | GTTC | 554 | TCCGTGTTGGGCATCGC | 1865 | UCCGUGUUGGGCAUCGCGG |
| exon_4 | | | | GGCCGGGGGCAGG | | CCGGGGGCAGG |
| BCL11A_ | + | GTTG | 555 | GGCATCGCGGCCGGGGG | 1866 | GGCAUCGCGGCCGGGGGCA |
| exon_4 | | | | CAGGTCGAACTCC | | GGUCGAACUCC |
| BCL11A_ | + | TTTG | 556 | AACGTCTTGCCGCAGAA | 1867 | AACGUCUUGCCGCAGAACU |
| exon_4 | | | | CTCGCATGACTTG | | CGCAUGACUUG |
| BCL11A_ | + | CTTG | 557 | CCGCAGAACTCGCATGA | 1868 | CCGCAGAACUCGCAUGACU |
| exon_4 | | | | CTTGGACTTGACC | | UGGACUUGACC |
| BCL11A_ | + | CTTG | 558 | GACTTGACCGGGGGCTG | 1869 | GACUUGACCGGGGGCUGGG |
| exon_4 | | | | GGAGGGAGGAGGG | | AGGGAGGAGGG |
| BCL11A_ | + | CTTG | 559 | ACCGGGGGCTGGGAGGG | 1870 | ACCGGGGGCUGGGAGGGAG |
| exon 4 | | | | AGGAGGGGCGGAT | | GAGGGGCGGAU |
| BCL11A_ | + | ATTG | 560 | CAGAGGAGGGAGGGGGG | 1871 | CAGAGGAGGGAGGGGGGGC |
| exon 4 | | | | GCGTCGCCAGGAA | | GUCGCCAGGAA |
| BCL11A_ | + | CTTG | 561 | CTACCTGGCTGGAATGG | 1872 | CUACCUGGCUGGAAUGGUU |
| exon 4 | | | | TTGCAGTAACCTT | | GCAGUAACCUU |
| BCL11A_ | + | GTTG | 562 | CAGTAACCTTTGCATAG | 1873 | CAGUAACCUUUGCAUAGGG |
| exon_4 | | | | GGCTGGGCCGGCC | | CUGGGCCGGCC |
| BCL11A_ | + | CTTT | 563 | GCATAGGGCTGGGCCGG | 1874 | GCAUAGGGCUGGGCCGGCC |
| exon_4 | | | | CCTGGGGACAGCG | | UGGGGACAGCG |
| BCL11A_ | + | TTTG | 564 | CATAGGGCTGGGCCGGC | 1875 | CAUAGGGCUGGGCCGGCCU |
| exon_4 | | | | CTGGGGACAGCGG | | GGGGACAGCGG |
| BCL11A_ | + | GTTC | 565 | CCTGCCAGCTCTCTAAG | 1876 | CCUGCCAGCUCUCUAAGUC |
| exon_4 | | | | TCTCCTAGAGAAA | | UCCUAGAGAAA |
| BCL11A_ | + | ATTG | 566 | GATTCAACCGCAGCACC | 1877 | GAUUCAACCGCAGCACCCU |
| exon_4 | | | | CTGTCAAAGGCAC | | GUCAAAGGCAC |
| BCL11A_ | + | ATTC | 567 | AACCGCAGCACCCTGTC | 1878 | AACCGCAGCACCCUGUCAA |
| exon_4 | | | | AAAGGCACTCGGG | | AGGCACUCGGG |
| BCL11A_ | + | CTTC | 568 | CGCCCCCAGGCGCTCTA | 1879 | CGCCCCCAGGCGCUCUAUG |
| exon_4 | | | | TGCGGTGGGGGTC | | CGGUGGGGGUC |
| BCL11A_ | + | CTTC | 569 | TGCCAGGCCGGAAGCCT | 1880 | UGCCAGGCCGGAAGCCUCU |
| exon_4 | | | | CTCTCGATACTGA | | CUCGAUACUGA |
| BCL11A_ | + | ATTC | 570 | TTAGCAGGTTAAAGGGG | 1881 | UUAGCAGGUUAAAGGGGUU |
| exon_4 | | | | TTATTGTCTGCAA | | AUUGUCUGCAA |
| BCL11A_ | + | CTTA | 571 | GCAGGTTAAAGGGGTTA | 1882 | GCAGGUUAAAGGGGUUAUU |
| exon_4 | | | | TTGTCTGCAATAT | | GUCUGCAAUAU |
| BCL11A_ | + | GTTA | 572 | AAGGGGTTATTGTCTGC | 1883 | AAGGGGUUAUUGUCUGCAA |
| exon 4 | | | | AATATGAATCCCA | | UAUGAAUCCCA |
| BCL11A_ | + | GTTG | 573 | TACATGTGTAGCTGCTG | 1884 | UACAUGUGUAGCUGCUGGG |
| exon_4 | | | | GGCTCATCTTTAC | | CUCAUCUUUAC |
| BCL11A_ | + | TTTG | 574 | CAAGTTGTACATGTGTA | 1885 | CAAGUUGUACAUGUGUAGC |
| exon_4 | | | | GCTGCTGGGCTCA | | UGCUGGGCUCA |
| BCL11A_ | + | GTTT | 575 | GCAAGTTGTACATGTGT | 1886 | GCAAGUUGUACAUGUGUAG |
| exon_4 | | | | AGCTGCTGGGCTC | | CUGCUGGGCUC |
| BCL11A_ | + | GTTG | 576 | CAAGAGAAACCATGCAC | 1887 | CAAGAGAAACCAUGCACUG |
| exon 4 | | | | TGGTGAATGGCTG | | GUGAAUGGCUG |
| BCL11A_ | + | GTTC | 577 | TGTGCGTGTTGCAAGAG | 1888 | UGUGCGUGUUGCAAGAGAA |
| exon_4 | | | | AAACCATGCACTG | | ACCAUGCACUG |
| BCL11A_ | + | CTTA | 578 | ATCCATGAGTGTTCTGT | 1889 | AUCCAUGAGUGUUCUGUGC |
| exon_4 | | | | GCGTGTTGCAAGA | | GUGUUGCAAGA |
| BCL11A_ | + | ATTT | 579 | GAACGTCTTGCCGCAGA | 1890 | GAACGUCUUGCCGCAGAAC |
| exon_4 | | | | ACTCGCATGACTT | | UCGCAUGACUU |
| BCL11A_ | + | ATTC | 580 | TTAATCCATGAGTGTTC | 1891 | UUAAUCCAUGAGUGUUCUG |
| exon 4 | | | | TGTGCGTGTTGCA | | UGCGUGUUGCA |
| BCL11A_ | + | CTTT | 581 | CTAAGTAGATTCTTAAT | 1892 | CUAAGUAGAUUCUUAAUCC |
| exon 4 | | | | CCATGAGTGTTCT | | AUGAGUGUUCU |
| BCL11A_ | + | GTTC | 582 | GCTTTCTAAGTAGATTC | 1893 | GCUUUCUAAGUAGAUUCUU |
| exon_4 | | | | TTAATCCATGAGT | | AAUCCAUGAGU |
| BCL11A_ | + | CTTC | 583 | CGTGTTCGCTTTCTAAG | 1894 | CGUGUUCGCUUUCUAAGUA |
| exon_4 | | | | TAGATTCTTAATC | | GAUUCUUAAUC |
| BCL11A_ | + | ATTC | 584 | TGCACCTAGTCCTGAAG | 1895 | UGCACCUAGUCCUGAAGGG |
| exon_4 | | | | GGATACCAACCCG | | AUACCAACCCG |
| BCL11A_ | + | ATTG | 585 | TCTGCAATATGAATCCC | 1896 | UCUGCAAUAUGAAUCCCAU |
| exon_4 | | | | ATGGAGAGGTGGC | | GGAGAGGUGGC |
| BCL11A_ | + | GTTA | 586 | TTGTCTGCAATATGAAT | 1897 | UUGUCUGCAAUAUGAAUCC |
| exon_4 | | | | CCCATGGAGAGGT | | CAUGGAGAGGU |
| BCL11A_ | + | TTTC | 587 | TAAGTAGATTCTTAATC | 1898 | UAAGUAGAUUCUUAAUCCA |
| exon_4 | | | | CATGAGTGTTCTG | | UGAGUGUUCUG |
| BCL11A_ | + | TTTA | 588 | AAATAGCCATAACATAC | 1899 | AAAUAGCCAUAACAUACCA |
| exon_4 | | | | CATACATGCTGTC | | UACAUGCUGUC |
| BCL11A_ | + | GTTG | 589 | CTCTGAAATTTGAACGT | 1900 | CUCUGAAAUUUGAACGUCU |
| exon_4 | | | | CTTGCCGCAGAAC | | UGCCGCAGAAC |
| BCL11A_ | + | CTTG | 590 | TAGGGCTTCTCGCCCGT | 1901 | UAGGGCUUCUCGCCCGUGU |
| exon_4 | | | | GTGGCTGCGCCGG | | GGCUGCGCCGG |
| BCL11A_ | + | CTTC | 591 | TCGAGCTTGATGCGCTT | 1902 | UCGAGCUUGAUGCGCUUAG |
| exon_4 | | | | AGAGAAGGGGCTC | | AGAAGGGGCUC |
| BCL11A_ | + | CTTG | 592 | ATGCGCTTAGAGAAGGG | 1903 | AUGCGCUUAGAGAAGGGGC |
| exon_4 | | | | GCTCAGCGAGCTG | | UCAGCGAGCUG |
| BCL11A_ | + | CTTA | 593 | GAGAAGGGGCTCAGCGA | 1904 | GAGAAGGGGCUCAGCGAGC |
| exon_4 | | | | GCTGGGGCTGCCC | | UGGGGCUGCCC |
| BCL11A_ | + | CTTT | 594 | TTGGACAGGCCCCCCGA | 1905 | UUGGACAGGCCCCCCGAGG |
| exon_4 | | | | GGCCGACTCGCCC | | CCGACUCGCCC |
| BCL11A_ | + | TTTT | 595 | TGGACAGGCCCCCCGAG | 1906 | UGGACAGGCCCCCCGAGGC |
| exon_4 | | | | GCCGACTCGCCCG | | CGACUCGCCCG |
| BCL11A_ | + | TTTT | 596 | GGACAGGCCCCCCGAGG | 1907 | GGACAGGCCCCCCGAGGCC |
| exon 4 | | | | CCGACTCGCCCGG | | GACUCGCCCGG |
| BCL11A_ | + | TTTG | 597 | GACAGGCCCCCCGAGGC | 1908 | GACAGGCCCCCCGAGGCCG |
| exon_4 | | | | CGACTCGCCCGGG | | ACUCGCCCGGG |
| BCL11A_ | + | ATTA | 598 | ACAGTGCCATCGTCTAT | 1909 | ACAGUGCCAUCGUCUAUGC |
| exon 4 | | | | GCGGTCCGACTCG | | GGUCCGACUCG |
| BCL11A_ | + | CTTC | 599 | GTCGCAAGTGTCCCTGT | 1910 | GUCGCAAGUGUCCCUGUGG |
| exon_4 | | | | GGCCCTCGGCCTC | | CCCUCGGCCUC |
| BCL11A_ | + | CTTA | 600 | TGCTTCTCGCCCAGGAC | 1911 | UGCUUCUCGCCCAGGACCU |
| exon_4 | | | | CTGGTGGAAGGCC | | GGUGGAAGGCC |
| BCL11A_ | + | CTTC | 601 | TCGCCCAGGACCTGGTG | 1912 | UCGCCCAGGACCUGGUGGA |
| exon_4 | | | | GAAGGCCTCGCTG | | AGGCCUCGCUG |
| BCL11A_ | + | GTTC | 602 | TCGTGGTGGCGCGCCGC | 1913 | UCGUGGUGGCGCGCCGCCU |
| exon_4 | | | | CTCCAGGCTCAGC | | CCAGGCUCAGC |
| BCL11A_ | + | CTTC | 603 | CTCCTCTTCTTCCTCTT | 1914 | CUCCUCUUCUUCCUCUUCC |
| exon_4 | | | | CCTCGTCGTCCTC | | UCGUCGUCCUC |
| BCL11A_ | + | CTTC | 604 | TTCCTCTTCCTCGTCGT | 1915 | UUCCUCUUCCUCGUCGUCC |
| exon_4 | | | | CCTCCTCTTCCTC | | UCCUCUUCCUC |
| BCL11A_ | + | CTTC | 605 | CTCTTCCTCGTCGTCCT | 1916 | CUCUUCCUCGUCGUCCUCC |
| exon_4 | | | | CCTCTTCCTCCTC | | UCUUCCUCCUC |
| BCL11A_ | + | CTTC | 606 | CTCGTCGTCCTCCTCTT | 1917 | CUCGUCGUCCUCCUCUUCC |
| exon_4 | | | | CCTCCTCGTCCCC | | UCCUCGUCCCC |
| BCL11A_ | + | CTTC | 607 | CTCCTCGTCCCCGTTCT | 1918 | CUCCUCGUCCCCGUUCUCC |
| exon_4 | | | | CCGGGATCAGGTT | | GGGAUCAGGUU |
| BCL11A_ | + | GTTG | 608 | CACTTGTAGGGCTTCTC | 1919 | CACUUGUAGGGCUUCUCGC |
| exon_4 | | | | GCCCGTGTGGCTG | | CCGUGUGGCUG |
| BCL11A_ | + | CTTG | 609 | CTGGCCTGGGTGCACGC | 1920 | CUGGCCUGGGUGCACGCGU |
| exon 4 | | | | GTGGTCGCACAGG | | GGUCGCACAGG |
| BCL11A_ | + | CTTC | 610 | AGCTTGCTGGCCTGGGT | 1921 | AGCUUGCUGGCCUGGGUGC |
| exon_4 | | | | GCACGCGTGGTCG | | ACGCGUGGUCG |
| BCL11A_ | + | CTTC | 611 | ATGTGGCGCTTCAGCTT | 1922 | AUGUGGCGCUUCAGCUUGC |
| exon_4 | | | | GCTGGCCTGGGTG | | UGGCCUGGGUG |
| BCL11A_ | + | TTTG | 612 | TGCATGTGCGTCTTCAT | 1923 | UGCAUGUGCGUCUUCAUGU |
| exon_4 | | | | GTGGCGCTTCAGC | | GGCGCUUCAGC |
| BCL11A_ | + | ATTT | 613 | GTGCATGTGCGTCTTCA | 1924 | GUGCAUGUGCGUCUUCAUG |
| exon_4 | | | | TGTGGCGCTTCAG | | UGGCGCUUCAG |
| BCL11A_ | + | CTTC | 614 | TCGCCCGTGTGGCTGCG | 1925 | UCGCCCGUGUGGCUGCGCC |
| exon_4 | | | | CCGGTGCACCACC | | GGUGCACCACC |
| BCL11A_ | + | CTTG | 615 | ACCGTCATGGGGGACGA | 1926 | ACCGUCAUGGGGGACGAUU |
| exon_4 | | | | TTTGTGCATGTGC | | UGUGCAUGUGC |
| BCL11A_ | + | CTTG | 616 | AGCGCGCTGCTGGCGCT | 1927 | AGCGCGCUGCUGGCGCUGC |
| exon_4 | | | | GCCCACCAAGTCG | | CCACCAAGUCG |
| BCL11A_ | + | CTTG | 617 | GCCACCACGGACTTGAG | 1928 | GCCACCACGGACUUGAGCG |
| exon_4 | | | | CGCGCTGCTGGCG | | CGCUGCUGGCG |
| BCL11A_ | + | CTTG | 618 | AACTTGGCCACCACGGA | 1929 | AACUUGGCCACCACGGACU |
| exon_4 | | | | CTTGAGCGCGCTG | | UGAGCGCGCUG |
| BCL11A_ | + | GTTC | 619 | TCGCTCTTGAACTTGGC | 1930 | UCGCUCUUGAACUUGGCCA |
| exon_4 | | | | CACCACGGACTTG | | CCACGGACUUG |
| BCL11A_ | + | GTTG | 620 | GGGTCGTTCTCGCTCTT | 1931 | GGGUCGUUCUCGCUCUUGA |
| exon_4 | | | | GAACTTGGCCACC | | ACUUGGCCACC |
| BCL11A_ | + | GTTC | 621 | TCCGGGATCAGGTTGGG | 1932 | UCCGGGAUCAGGUUGGGGU |
| exon_4 | | | | GTCGTTCTCGCTC | | CGUUCUCGCUC |
| BCL11A_ | + | GTTC | 622 | CGGGGAGCTGGCGGTGG | 1933 | CGGGGAGCUGGCGGUGGAG |
| exon_4 | | | | AGAGACCGTCGTC | | AGACCGUCGUC |
| BCL11A_ | + | ATTT | 623 | AAAATAGCCATAACATA | 1934 | AAAAUAGCCAUAACAUACC |
| exon_4 | | | | CCATACATGCTGT | | AUACAUGCUGU |
| BCL11A_ | + | ATTA | 624 | GGGACAATTTAAAATAG | 1935 | GGGACAAUUUAAAAUAGCC |
| exon_4 | | | | CCATAACATACCA | | AUAACAUACCA |
| BCL11A_ | + | TTTG | 625 | CTCAGCAACGAATTAGG | 1936 | CUCAGCAACGAAUUAGGGA |
| exon_4 | | | | GACAATTTAAAAT | | CAAUUUAAAAU |
| BCL11A_ | + | CTTA | 626 | CTAGTGTATTTAATTGC | 1937 | CUAGUGUAUUUAAUUGCGU |
| exon_4 | | | | GTTCCAGGGCTTT | | UCCAGGGCUUU |
| BCL11A_ | + | ATTT | 627 | AATTGCGTTCCAGGGCT | 1938 | AAUUGCGUUCCAGGGCUUU |
| exon_4 | | | | TTTGCACATTACA | | UGCACAUUACA |
| BCL11A_ | + | TTTA | 628 | ATTGCGTTCCAGGGCTT | 1939 | AUUGCGUUCCAGGGCUUUU |
| exon_4 | | | | TTGCACATTACAC | | GCACAUUACAC |
| BCL11A_ | + | ATTG | 629 | CGTTCCAGGGCTTTTGC | 1940 | CGUUCCAGGGCUUUUGCAC |
| exon_4 | | | | ACATTACACATTC | | AUUACACAUUC |
| BCL11A_ | + | GTTC | 630 | CAGGGCTTTTGCACATT | 1941 | CAGGGCUUUUGCACAUUAC |
| exon_4 | | | | ACACATTCAATTT | | ACAUUCAAUUU |
| BCL11A_ | + | CTTT | 631 | TGCACATTACACATTCA | 1942 | UGCACAUUACACAUUCAAU |
| exon_4 | | | | ATTTAATCATTGT | | UUAAUCAUUGU |
| BCL11A_ | + | TTTT | 632 | GCACATTACACATTCAA | 1943 | GCACAUUACACAUUCAAUU |
| exon_4 | | | | TTTAATCATTGTT | | UAAUCAUUGUU |
| BCL11A_ | + | TTTG | 633 | CACATTACACATTCAAT | 1944 | CACAUUACACAUUCAAUUU |
| exon_4 | | | | TTAATCATTGTTT | | AAUCAUUGUUU |
| BCL11A_ | + | ATTA | 634 | CACATTCAATTTAATCA | 1945 | CACAUUCAAUUUAAUCAUU |
| exon_4 | | | | TTGTTTAAAAAAA | | GUUUAAAAAAA |
| BCL11A_ | + | ATTC | 635 | AATTTAATCATTGTTTA | 1946 | AAUUUAAUCAUUGUUUAAA |
| exon_4 | | | | AAAAAAATAAAAC | | AAAAAAAAAC |
| BCL11A_ | + | ATTT | 636 | AATCATTGTTTAAAAAA | 1947 | AAUCAUUGUUUAAAAAAAA |
| exon_4 | | | | AATAAAACTTTGG | | UAAAACUUUGG |
| BCL11A_ | + | TTTA | 637 | ATCATTGTTTAAAAAAA | 1948 | AUCAUUGUUUAAAAAAAAU |
| exon_4 | | | | ATAAAACTTTGGG | | AAAACUUUGGG |
| BCL11A_ | + | ATTG | 638 | TTTAAAAAAAATAAAAC | 1949 | UUUAAAAAAAAUAAAACUU |
| exon 4 | | | | TTTGGGCAAAACA | | UGGGCAAAACA |
| BCL11A_ | + | GTTT | 639 | AAAAAAAATAAAACTTT | 1950 | AAAAAAAAUAAAACUUUGG |
| exon_4 | | | | GGGCAAAACAGCC | | GCAAAACAGCC |
| BCL11A_ | + | TTTA | 640 | AAAAAAATAAAACTTTG | 1951 | AAAAAAAUAAAACUUUGGG |
| exon_4 | | | | GGCAAAACAGCCC | | CAAAACAGCCC |
| BCL11A_ | + | CTTT | 641 | GGGCAAAACAGCCCATT | 1952 | GGGCAAAACAGCCCAUUUC |
| exon_4 | | | | TCTTTTAAGCTCT | | UUUUAAGCUCU |
| BCL11A_ | + | TTTG | 642 | GGCAAAACAGCCCATTT | 1953 | GGCAAAACAGCCCAUUUCU |
| exon_4 | | | | CTTTTAAGCTCTC | | UUUAAGCUCUC |
| BCL11A_ | + | ATTA | 643 | AACTAAAGGAAAAATGA | 1954 | AACUAAAGGAAAAAUGAUG |
| exon_4 | | | | TGATTAACTAGGA | | AUUAACUAGGA |
| BCL11A_ | + | TTTA | 644 | TAAAATTAAACTAAAGG | 1955 | UAAAAUUAAACUAAAGGAA |
| exon_4 | | | | AAAAATGATGATT | | AAAUGAUGAUU |
| BCL11A_ | + | GTTT | 645 | ATAAAATTAAACTAAAG | 1956 | AUAAAAUUAAACUAAAGGA |
| exon_4 | | | | GAAAAATGATGAT | | AAAAUGAUGAU |
| BCL11A_ | + | TTTG | 646 | TTTATAAAATTAAACTA | 1957 | UUUAUAAAAUUAAACUAAA |
| exon_4 | | | | AAGGAAAAATGAT | | GGAAAAAUGAU |
| BCL11A_ | + | TTTT | 647 | GTTTATAAAATTAAACT | 1958 | GUUUAUAAAAUUAAACUAA |
| exon_4 | | | | AAAGGAAAAATGA | | AGGAAAAAUGA |
| BCL11A_ | + | GTTT | 648 | TGTTTATAAAATTAAAC | 1959 | UGUUUAUAAAAUUAAACUA |
| exon_4 | | | | TAAAGGAAAAATG | | AAGGAAAAAUG |
| BCL11A_ | + | CTTC | 649 | ATAAAATGAACTCCTTA | 1960 | AUAAAAUGAACUCCUUACU |
| exon_4 | | | | CTAGTGTATTTAA | | AGUGUAUUUAA |
| BCL11A_ | + | TTTA | 650 | TACTGGTATAATCAGTT | 1961 | UACUGGUAUAAUCAGUUUU |
| exon_4 | | | | TTGTTTATAAAAT | | GUUUAUAAAAU |
| BCL11A_ | + | CTTT | 651 | TATACTGGTATAATCAG | 1962 | UAUACUGGUAUAAUCAGUU |
| exon_4 | | | | TTTTGTTTATAAA | | UUGUUUAUAAA |
| BCL11A_ | + | TTTA | 652 | AGCTCTCACCAGGAGCA | 1963 | AGCUCUCACCAGGAGCAAA |
| exon_4 | | | | AAGTAGCTTTTAT | | GUAGCUUUUAU |
| BCL11A_ | + | TTTT | 653 | AAGCTCTCACCAGGAGC | 1964 | AAGCUCUCACCAGGAGCAA |
| exon_4 | | | | AAAGTAGCTTTTA | | AGUAGCUUUUA |
| BCL11A_ | + | CTTT | 654 | TAAGCTCTCACCAGGAG | 1965 | UAAGCUCUCACCAGGAGCA |
| exon_4 | | | | CAAAGTAGCTTTT | | AAGUAGCUUUU |
| BCL11A_ | + | TTTC | 655 | TTTTAAGCTCTCACCAG | 1966 | UUUUAAGCUCUCACCAGGA |
| exon_4 | | | | GAGCAAAGTAGCT | | GCAAAGUAGCU |
| BCL11A_ | + | ATTT | 656 | CTTTTAAGCTCTCACCA | 1967 | CUUUUAAGCUCUCACCAGG |
| exon_4 | | | | GGAGCAAAGTAGC | | AGCAAAGUAGC |
| BCL11A_ | + | TTTT | 657 | ATACTGGTATAATCAGT | 1968 | AUACUGGUAUAAUCAGUUU |
| exon 4 | | | | TTTGTTTATAAAA | | UGUUUAUAAAA |
| BCL11A_ | + | ATTA | 658 | ACTAGGACATAATGGGT | 1969 | ACUAGGACAUAAUGGGUCA |
| exon_4 | | | | CATCTTTTTAGGT | | UCUUUUUAGGU |
| BCL11A_ | + | ATTA | 659 | AAGCAAATATCTTCATA | 1970 | AAGCAAAUAUCUUCAUAAA |
| exon_4 | | | | AAATGAACTCCTT | | AUGAACUCCUU |
| BCL11A_ | + | TTTA | 660 | AAAAGACATTATTAAAG | 1971 | AAAAGACAUUAUUAAAGCA |
| exon_4 | | | | CAAATATCTTCAT | | AAUAUCUUCAU |
| BCL11A_ | + | GTTC | 661 | TAGTTTTAAATGGCAAA | 1972 | UAGUUUUAAAUGGCAAAUA |
| exon_4 | | | | TAGTACCACGTTG | | GUACCACGUUG |
| BCL11A_ | + | GTTT | 662 | TAAATGGCAAATAGTAC | 1973 | UAAAUGGCAAAUAGUACCA |
| exon_4 | | | | CACGTTGTGCTAA | | CGUUGUGCUAA |
| BCL11A_ | + | TTTT | 663 | AAATGGCAAATAGTACC | 1974 | AAAUGGCAAAUAGUACCAC |
| exon_4 | | | | ACGTTGTGCTAAT | | GUUGUGCUAAU |
| BCL11A_ | + | TTTA | 664 | AATGGCAAATAGTACCA | 1975 | AAUGGCAAAUAGUACCACG |
| exon_4 | | | | CGTTGTGCTAATA | | UUGUGCUAAUA |
| BCL11A_ | + | GTTG | 665 | TGCTAATAAATCATATT | 1976 | UGCUAAUAAAUCAUAUUAU |
| exon 4 | | | | ATTTTCTTCTGTT | | UUUCUUCUGUU |
| BCL11A_ | + | ATTA | 666 | TTTTCTTCTGTTCCCCT | 1977 | UUUUCUUCUGUUCCCCUCU |
| exon 4 | | | | CTGTCAAACCTTA | | GUCAAACCUUA |
| BCL11A_ | + | ATTT | 667 | TCTTCTGTTCCCCTCTG | 1978 | UCUUCUGUUCCCCUCUGUC |
| exon 4 | | | | TCAAACCTTATTG | | AAACCUUAUUG |
| BCL11A_ | + | TTTT | 668 | CTTCTGTTCCCCTCTGT | 1979 | CUUCUGUUCCCCUCUGUCA |
| exon_4 | | | | CAAACCTTATTGT | | AACCUUAUUGU |
| BCL11A_ | + | TTTC | 669 | TTCTGTTCCCCTCTGTC | 1980 | UUCUGUUCCCCUCUGUCAA |
| exon_4 | | | | AAACCTTATTGTC | | ACCUUAUUGUC |
| BCL11A_ | + | CTTC | 670 | TGTTCCCCTCTGTCAAA | 1981 | UGUUCCCCUCUGUCAAACC |
| exon_4 | | | | CCTTATTGTCAGC | | UUAUUGUCAGC |
| BCL11A_ | + | GTTC | 671 | CCCTCTGTCAAACCTTA | 1982 | CCCUCUGUCAAACCUUAUU |
| exon_4 | | | | TTGTCAGCCTCTT | | GUCAGCCUCUU |
| BCL11A_ | + | CTTA | 672 | TTGTCAGCCTCTTCCTT | 1983 | UUGUCAGCCUCUUCCUUUC |
| exon 4 | | | | TCAATATGGTATA | | AAUAUGGUAUA |
| BCL11A_ | + | ATTG | 673 | TCAGCCTCTTCCTTTCA | 1984 | UCAGCCUCUUCCUUUCAAU |
| exon 4 | | | | ATATGGTATACAA | | AUGGUAUACAA |
| BCL11A_ | + | CTTC | 674 | CTTTCAATATGGTATAC | 1985 | CUUUCAAUAUGGUAUACAA |
| exon 4 | | | | AAGGTCTTAAAGT | | GGUCUUAAAGU |
| BCL11A_ | + | CTTT | 675 | CAATATGGTATACAAGG | 1986 | CAAUAUGGUAUACAAGGUC |
| exon 4 | | | | TCTTAAAGTTTAT | | UUAAAGUUUAU |
| BCL11A_ | − | TTTC | 676 | AATATGGTATACAAGGT | 1987 | AAUAUGGUAUACAAGGUCU |
| exon_4 | | | | CTTAAAGTTTATC | | UAAAGUUUAUC |
| BCL11A_ | + | CTTA | 677 | AAGTTTATCATTTGATT | 1988 | AAGUUUAUCAUUUGAUUGU |
| exon_4 | | | | GTCCACTTGACAA | | CCACUUGACAA |
| BCL11A_ | + | TTTT | 678 | AAAAAGACATTATTAAA | 1989 | AAAAAGACAUUAUUAAAGC |
| exon_4 | | | | GCAAATATCTTCA | | AAAUAUCUUCA |
| BCL11A_ | + | TTTT | 679 | TAAAAAGACATTATTAA | 1990 | UAAAAAGACAUUAUUAAAG |
| exon_4 | | | | AGCAAATATCTTC | | CAAAUAUCUUC |
| BCL11A_ | + | ATTT | 680 | TTAAAAAGACATTATTA | 199 | UUAAAAAGACAUUAUUAAA |
| exon 4 | | | | AAGCAAATATCTT | | GCAAAUAUCUU |
| BCL11A_ | + | TTTG | 681 | GTGCCAGTATTTTTAAA | 1992 | GUGCCAGUAUUUUUAAAAA |
| exon_4 | | | | AAGACATTATTAA | | GACAUUAUUAA |
| BCL11A_ | + | TTTT | 682 | GGTGCCAGTATTTTTAA | 1993 | GGUGCCAGUAUUUUUAAAA |
| exon 4 | | | | AAAGACATTATTA | | AGACAUUAUUA |
| BCL11A_ | + | CTTT | 683 | TGGTGCCAGTATTTTTA | 1994 | UGGUGCCAGUAUUUUUAAA |
| exon_4 | | | | AAAAGACATTATT | | AAGACAUUAUU |
| BCL11A_ | + | ATTA | 684 | TTAAAGCAAATATCTTC | 1995 | UUAAAGCAAAUAUCUUCAU |
| exon 4 | | | | ATAAAATGAACTC | | AAAAUGAACUC |
| BCL11A_ | + | TTTC | 685 | TTTTGGTGCCAGTATTT | 1996 | UUUUGGUGCCAGUAUUUUU |
| exon_4 | | | | TTAAAAAGACATT | | AAAAAGACAUU |
| BCL11A_ | + | CTTG | 686 | ACAACCAAGTAGATCTG | 1997 | ACAACCAAGUAGAUCUGGA |
| exon_4 | | | | GATCTATTTCTTT | | UCUAUUUCUUU |
| BCL11A_ | + | ATTG | 687 | TCCACTTGACAACCAAG | 1998 | UCCACUUGACAACCAAGUA |
| exon_4 | | | | TAGATCTGGATCT | | GAUCUGGAUCU |
| BCL11A_ | + | TTTG | 688 | ATTGTCCACTTGACAAC | 1999 | AUUGUCCACUUGACAACCA |
| exon_4 | | | | CAAGTAGATCTGG | | AGUAGAUCUGG |
| BCL11A_ | + | ATTT | 689 | GATTGTCCACTTGACAA | 2000 | GAUUGUCCACUUGACAACC |
| exon 4 | | | | CCAAGTAGATCTG | | AAGUAGAUCUG |
| BCL11A_ | + | TTTA | 690 | TCATTTGATTGTCCACT | 2001 | UCAUUUGAUUGUCCACUUG |
| exon 4 | | | | TGACAACCAAGTA | | ACAACCAAGUA |
| BCL11A_ | + | GTTT | 691 | ATCATTTGATTGTCCAC | 2002 | AUCAUUUGAUUGUCCACUU |
| exon_4 | | | | TTGACAACCAAGT | | GACAACCAAGU |
| BCL11A_ | + | ATTT | 692 | CTTTTGGTGCCAGTATT | 2003 | CUUUUGGUGCCAGUAUUUU |
| exon_4 | | | | TTTAAAAAGACAT | | UAAAAAGACAU |
| BCL11A_ | + | ATTA | 693 | GCTTATATACCTGTTCT | 2004 | GCUUAUAUACCUGUUCUAG |
| exon_4 | | | | AGTTTTAAATGGC | | UUUUAAAUGGC |
| BCL11A_ | + | CTTT | 694 | TTAGGTAGCCATTGTTG | 2005 | UUAGGUAGCCAUUGUUGUG |
| exon_4 | | | | TGAGAAATACAAT | | AGAAAUACAAU |
| BCL11A_ | + | TTTT | 695 | AGGTAGCCATTGTTGTG | 2006 | AGGUAGCCAUUGUUGUGAG |
| exon_4 | | | | AGAAATACAATAT | | AAAUACAAUAU |
| BCL11A_ | + | ATTG | 696 | ATACATTTAACCCTTTA | 2007 | AUACAUUUAACCCUUUAGA |
| exon 4 | | | | GAGACAGACATTT | | GACAGACAUUU |
| BCL11A_ | + | ATTT | 697 | AACCCTTTAGAGACAGA | 2008 | AACCCUUUAGAGACAGACA |
| exon_4 | | | | CATTTAGCTCATA | | UUUAGCUCAUA |
| BCL11A_ | + | TTTA | 698 | ACCCTTTAGAGACAGAC | 2009 | ACCCUUUAGAGACAGACAU |
| exon_4 | | | | ATTTAGCTCATAG | | UUAGCUCAUAG |
| BCL11A_ | + | CTTT | 699 | AGAGACAGACATTTAGC | 2010 | AGAGACAGACAUUUAGCUC |
| exon_4 | | | | TCATAGAGATTTT | | AUAGAGAUUUU |
| BCL11A_ | + | TTTA | 700 | GAGACAGACATTTAGCT | 2011 | GAGACAGACAUUUAGCUCA |
| exon_4 | | | | CATAGAGATTTTT | | UAGAGAUUUUU |
| BCL11A_ | + | ATTT | 701 | AGCTCATAGAGATTTTT | 2012 | AGCUCAUAGAGAUUUUUUU |
| exon_4 | | | | TTTCAGTGCTATC | | UCAGUGCUAUC |
| BCL11A_ | + | TTTA | 702 | GCTCATAGAGATTTTTT | 2013 | GCUCAUAGAGAUUUUUUUU |
| exon 4 | | | | TTCAGTGCTATCT | | CAGUGCUAUCU |
| BCL11A_ | + | ATTT | 703 | TTTTTCAGTGCTATCTA | 2014 | UUUUUCAGUGCUAUCUAUU |
| exon 4 | | | | TTCTGTCTATAGA | | CUGUCUAUAGA |
| BCL11A_ | + | TTTT | 704 | TTTTCAGTGCTATCTAT | 2015 | UUUUCAGUGCUAUCUAUUC |
| exon 4 | | | | TCTGTCTATAGAG | | UGUCUAUAGAG |
| BCL11A_ | + | TTTT | 705 | TTTCAGTGCTATCTATT | 2016 | UUUCAGUGCUAUCUAUUCU |
| exon_4 | | | | CTGTCTATAGAGG | | GUCUAUAGAGG |
| BCL11A_ | + | TTTT | 706 | TTCAGTGCTATCTATTC | 2017 | UUCAGUGCUAUCUAUUCUG |
| exon 4 | | | | TGTCTATAGAGGG | | UCUAUAGAGGG |
| BCL11A_ | + | TTTT | 707 | TCAGTGCTATCTATTCT | 2018 | UCAGUGCUAUCUAUUCUGU |
| exon_4 | | | | GTCTATAGAGGGT | | CUAUAGAGGGU |
| BCL11A_ | + | TTTT | 708 | CAGTGCTATCTATTCTG | 2019 | CAGUGCUAUCUAUUCUGUC |
| exon 4 | | | | TCTATAGAGGGTT | | UAUAGAGGGUU |
| BCL11A_ | + | TTTC | 709 | AGTGCTATCTATTCTGT | 2020 | AGUGCUAUCUAUUCUGUCU |
| exon_4 | | | | CTATAGAGGGTTA | | AUAGAGGGUUA |
| BCL11A_ | + | ATTC | 710 | TGTCTATAGAGGGTTAA | 2021 | UGUCUAUAGAGGGUUAAUC |
| exon 4 | | | | TCCAAAGACTGTT | | CAAAGACUGUU |
| BCL11A_ | + | GTTA | 711 | ATCCAAAGACTGTTTTT | 2022 | AUCCAAAGACUGUUUUUCC |
| exon 4 | | | | CCTCCTCACGTTA | | UCCUCACGUUA |
| BCL11A_ | + | GTTT | 712 | TTCCTCCTCACGTTATA | 2023 | UUCCUCCUCACGUUAUAAA |
| exon_4 | | | | AAATAAAACTGTA | | AUAAAACUGUA |
| BCL11A_ | + | GTTT | 713 | GCTCAGCAACGAATTAG | 2024 | GCUCAGCAACGAAUUAGGG |
| exon_4 | | | | GGACAATTTAAAA | | ACAAUUUAAAA |
| BCL11A_ | + | TTTC | 714 | TCTCAGAACGGAACTGG | 2025 | UCUCAGAACGGAACUGGAA |
| exon 4 | | | | AAACAGCAACATG | | ACAGCAACAUG |
| BCL11A_ | + | TTTT | 715 | CTCTCAGAACGGAACTG | 2026 | CUCUCAGAACGGAACUGGA |
| exon 4 | | | | GAAACAGCAACAT | | AACAGCAACAU |
| BCL11A_ | + | TTTT | 716 | TCTCTCAGAACGGAACT | 2027 | UCUCUCAGAACGGAACUGG |
| exon 4 | | | | GGAAACAGCAACA | | AAACAGCAACA |
| BCL11A_ | + | CTTT | 717 | TTCTCTCAGAACGGAAC | 2028 | UUCUCUCAGAACGGAACUG |
| exon 4 | | | | TGGAAACAGCAAC | | GAAACAGCAAC |
| BCL11A_ | + | TTTC | 718 | TCTCTCTCTCTCTTTTT | 2029 | UCUCUCUCUCUCUUUUUCU |
| exon_4 | | | | CTCTCAGAACGGA | | CUCAGAACGGA |
| BCL11A_ | + | TTTC | 719 | CAATTGATACATTTAAC | 2030 | CAAUUGAUACAUUUAACCC |
| exon_4 | | | | CCTTTAGAGACAG | | UUUAGAGACAG |
| BCL11A_ | + | TTTT | 720 | CTCTCTCTCTCTCTTTT | 2031 | CUCUCUCUCUCUCUUUUUC |
| exon_4 | | | | TCTCTCAGAACGG | | UCUCAGAACGG |
| BCL11A_ | + | CTTT | 721 | TTCTCTCTCTCTCTCTT | 2032 | UUCUCUCUCUCUCUCUUUU |
| exon_4 | | | | TTTCTCTCAGAAC | | UCUCUCAGAAC |
| BCL11A_ | + | ATTA | 722 | CAGAATGTATGCAGCAT | 2033 | CAGAAUGUAUGCAGCAUGG |
| exon_4 | | | | GGTCTTTTTCTCT | | UCUUUUUCUCU |
| BCL11A_ | + | GTTA | 723 | TAAAATAAAACTGTACA | 2034 | UAAAAUAAAACUGUACAUG |
| exon_4 | | | | TGATATGTATTAC | | AUAUGUAUUAC |
| BCL11A_ | + | TTTC | 724 | CTCCTCACGTTATAAAA | 2035 | CUCCUCACGUUAUAAAAUA |
| exon_4 | | | | TAAAACTGTACAT | | AAACUGUACAU |
| BCL11A_ | + | TTTT | 725 | CCTCCTCACGTTATAAA | 2036 | CCUCCUCACGUUAUAAAAU |
| exon 4 | | | | ATAAAACTGTACA | | AAAACUGUACA |
| BCL11A_ | + | TTTT | 726 | TCCTCCTCACGTTATAA | 2037 | UCCUCCUCACGUUAUAAAA |
| exon_4 | | | | AATAAAACTGTAC | | UAAAACUGUAC |
| BCL11A_ | + | TTTT | 727 | TCTCTCTCTCTCTCTTT | 2038 | UCUCUCUCUCUCUCUUUUU |
| exon_4 | | | | TTCTCTCAGAACG | | CUCUCAGAACG |
| BCL11A_ | + | TTTT | 728 | TAGGTAGCCATTGTTGT | 2039 | UAGGUAGCCAUUGUUGUGA |
| exon_4 | | | | GAGAAATACAATA | | GAAAUACAAUA |
| BCL11A_ | + | CTTT | 729 | CCAATTGATACATTTAA | 2040 | CCAAUUGAUACAUUUAACC |
| exon_4 | | | | CCCTTTAGAGACA | | CUUUAGAGACA |
| BCL11A_ | + | TTTC | 730 | TTCCTTTCCAATTGATA | 2041 | UUCCUUUCCAAUUGAUACA |
| exon_4 | | | | CATTTAACCCTTT | | UUUAACCCUUU |
| BCL11A_ | + | TTTA | 731 | GGTAGCCATTGTTGTGA | 2042 | GGUAGCCAUUGUUGUGAGA |
| exon 4 | | | | GAAATACAATATA | | AAUACAAUAUA |
| BCL11A_ | + | ATTG | 732 | TTGTGAGAAATACAATA | 2043 | UUGUGAGAAAUACAAUAUA |
| exon 4 | | | | TAGAATTATATGC | | GAAUUAUAUGC |
| BCL11A_ | + | GTTG | 733 | TGAGAAATACAATATAG | 2044 | UGAGAAAUACAAUAUAGAA |
| exon 4 | | | | AATTATATGCTAG | | UUAUAUGCUAG |
| BCL11A_ | + | ATTA | 734 | TATGCTAGTTCCTAAGG | 2045 | UAUGCUAGUUCCUAAGGUU |
| exon 4 | | | | TTTATTACCTCAC | | UAUUACCUCAC |
| BCL11A_ | + | GTTC | 735 | CTAAGGTTTATTACCTC | 2046 | CUAAGGUUUAUUACCUCAC |
| exon 4 | | | | ACCCAATGCTGAA | | CCAAUGCUGAA |
| BCL11A_ | + | GTTT | 736 | ATTACCTCACCCAATGC | 2047 | AUUACCUCACCCAAUGCUG |
| exon 4 | | | | TGAATTAAGCTAC | | AAUUAAGCUAC |
| BCL11A_ | + | TTTA | 737 | TTACCTCACCCAATGCT | 2048 | UUACCUCACCCAAUGCUGA |
| exon_4 | | | | GAATTAAGCTACA | | AUUAAGCUACA |
| BCL11A_ | + | ATTA | 738 | CCTCACCCAATGCTGAA | 2049 | CCUCACCCAAUGCUGAAUU |
| exon_4 | | | | TTAAGCTACAAGT | | AAGCUACAAGU |
| BCL11A_ | + | ATTA | 739 | AGCTACAAGTTTATAAC | 2050 | AGCUACAAGUUUAUAACAA |
| exon_4 | | | | AAGTAGAAAGAAC | | GUAGAAAGAAC |
| BCL11A_ | + | GTTT | 740 | ATAACAAGTAGAAAGAA | 2051 | AUAACAAGUAGAAAGAACC |
| exon_4 | | | | CCATCGATGTGGT | | AUCGAUGUGGU |
| BCL11A_ | + | TTTA | 741 | TAACAAGTAGAAAGAAC | 2052 | UAACAAGUAGAAAGAACCA |
| exon_4 | | | | CATCGATGTGGTT | | UCGAUGUGGUU |
| BCL11A_ | + | GTTT | 742 | TAATAGATCCAAGGCAC | 2053 | UAAUAGAUCCAAGGCACUC |
| exon_4 | | | | TCATATTTTAAAA | | AUAUUUUAAAA |
| BCL11A_ | + | TTTT | 743 | AATAGATCCAAGGCACT | 2054 | AAUAGAUCCAAGGCACUCA |
| exon 4 | | | | CATATTTTAAAAC | | UAUUUUAAAAC |
| BCL11A_ | + | TTTA | 744 | ATAGATCCAAGGCACTC | 2055 | AUAGAUCCAAGGCACUCAU |
| exon 4 | | | | ATATTTTAAAACC | | AUUUUAAAACC |
| BCL11A_ | + | ATTT | 745 | TAAAACCAAATGATAGA | 2056 | UAAAACCAAAUGAUAGAAU |
| exon 4 | | | | ATAAACTTGTTCT | | AAACUUGUUCU |
| BCL11A_ | + | TTTT | 746 | AAAACCAAATGATAGAA | 2057 | AAAACCAAAUGAUAGAAUA |
| exon 4 | | | | TAAACTTGTTCTG | | AACUUGUUCUG |
| BCL11A_ | + | TTTA | 747 | AAACCAAATGATAGAAT | 2058 | AAACCAAAUGAUAGAAUAA |
| exon_4 | | | | AAACTTGTTCTGT | | ACUUGUUCUGU |
| BCL11A_ | + | TTTT | 748 | CTTCCTTTCCAATTGAT | 2059 | CUUCCUUUCCAAUUGAUAC |
| exon_4 | | | | ACATTTAACCCTT | | AUUUAACCCUU |
| BCL11A_ | + | TTTT | 749 | TCTTCCTTTCCAATTGA | 2060 | UCUUCCUUUCCAAUUGAUA |
| exon_4 | | | | TACATTTAACCCT | | CAUUUAACCCU |
| BCL11A_ | + | TTTT | 750 | TTCTTCCTTTCCAATTG | 2061 | UUCUUCCUUUCCAAUUGAU |
| exon_4 | | | | ATACATTTAACCC | | ACAUUUAACCC |
| BCL11A_ | + | CTTT | 751 | TTTCTTCCTTTCCAATT | 2062 | UUUCUUCCUUUCCAAUUGA |
| exon_4 | | | | GATACATTTAACC | | UACAUUUAACC |
| BCL11A_ | − | TTTT | 752 | TGGCAGTTGTCTGCATT | 2063 | UGGCAGUUGUCUGCAUUAA |
| exon_4 | | | | AACCTGTTCATAC | | CCUGUUCAUAC |
| BCL11A_ | + | TTTG | 753 | TCAATTCAAGGCCTTTT | 2064 | UCAAUUCAAGGCCUUUUUU |
| exon 4 | | | | TTCTTCCTTTCCA | | CUUCCUUUCCA |
| BCL11A_ | + | CTTC | 754 | CTTTCCAATTGATACAT | 2065 | CUUUCCAAUUGAUACAUUU |
| exon 4 | | | | TTAACCCTTTAGA | | AACCCUUUAGA |
| BCL11A_ | + | ATTT | 755 | GTCAATTCAAGGCCTTT | 2066 | GUCAAUUCAAGGCCUUUUU |
| exon 4 | | | | TTTCTTCCTTTCC | | UCUUCCUUUCC |
| BCL11A_ | + | TTTC | 756 | TGTTAATTTGTCAATTC | 2067 | UGUUAAUUUGUCAAUUCAA |
| exon_4 | | | | AAGGCCTTTTTTC | | GGCCUUUUUUC |
| BCL11A_ | + | TTTT | 757 | CTGTTAATTTGTCAATT | 2068 | CUGUUAAUUUGUCAAUUCA |
| exon_4 | | | | CAAGGCCTTTTTT | | AGGCCUUUUUU |
| BCL11A_ | + | TTTT | 758 | TCTGTTAATTTGTCAAT | 2069 | UCUGUUAAUUUGUCAAUUC |
| exon_4 | | | | TCAAGGCCTTTTT | | AAGGCCUUUUU |
| BCL11A_ | + | GTTT | 759 | TTCTGTTAATTTGTCAA | 2070 | UUCUGUUAAUUUGUCAAUU |
| exon_4 | | | | TTCAAGGCCTTTT | | CAAGGCCUUUU |
| BCL11A_ | + | GTTC | 760 | TGTTTTTCTGTTAATTT | 2071 | UGUUUUUCUGUUAAUUUGU |
| exon_4 | | | | GTCAATTCAAGGC | | CAAUUCAAGGC |
| BCL11A_ | + | CTTG | 761 | TTCTGTTTTTCTGTTAA | 2072 | UUCUGUUUUUCUGUUAAUU |
| exon_4 | | | | TTTGTCAATTCAA | | UGUCAAUUCAA |
| BCL11A_ | + | GTTA | 762 | ATTTGTCAATTCAAGGC | 2073 | AUUUGUCAAUUCAAGGCCU |
| exon 4 | | | | CTTTTTTCTTCCT | | UUUUUCUUCCU |
| BCL11A_ | − | TTTT | 763 | TTGGCAGTTGTCTGCAT | 2074 | UUGGCAGUUGUCUGCAUUA |
| exon 4 | | | | TAACCTGTTCATA | | ACCUGUUCAUA |
| BCL11A_ | − | TTTC | 764 | CTTCTATCACCCTACAT | 2075 | CUUCUAUCACCCUACAUUC |
| exon 4 | | | | TCCAGCATCTTAC | | CAGCAUCUUAC |
| BCL11A_ | − | GTTT | 765 | TTTTGGCAGTTGTCTGC | 2076 | UUUUGGCAGUUGUCUGCAU |
| exon_4 | | | | ATTAACCTGTTCA | | UAACCUGUUCA |
| BCL11A_ | − | ATTA | 766 | ACAGAAAAACAGAACAA | 2077 | ACAGAAAAACAGAACAAGU |
| exon_4 | | | | GTTTATTCTATCA | | UUAUUCUAUCA |
| BCL11A_ | − | GTTT | 767 | ATTCTATCATTTGGTTT | 2078 | AUUCUAUCAUUUGGUUUUA |
| exon_4 | | | | TAAAATATGAGTG | | AAAUAUGAGUG |
| BCL11A_ | − | TTTA | 768 | TTCTATCATTTGGTTTT | 2079 | UUCUAUCAUUUGGUUUUAA |
| exon_4 | | | | AAAATATGAGTGC | | AAUAUGAGUGC |
| BCL11A_ | − | ATTC | 769 | TATCATTTGGTTTTAAA | 2080 | UAUCAUUUGGUUUUAAAAU |
| exon_4 | | | | ATATGAGTGCCTT | | AUGAGUGCCUU |
| BCL11A_ | − | ATTT | 770 | GGTTTTAAAATATGAGT | 2081 | GGUUUUAAAAUAUGAGUGC |
| exon_4 | | | | GCCTTGGATCTAT | | CUUGGAUCUAU |
| BCL11A_ | − | TTTG | 771 | GTTTTAAAATATGAGTG | 2082 | GUUUUAAAAUAUGAGUGCC |
| exon_4 | | | | CCTTGGATCTATT | | UUGGAUCUAUU |
| BCL11A_ | − | GTTT | 772 | TAAAATATGAGTGCCTT | 2083 | UAAAAUAUGAGUGCCUUGG |
| exon 4 | | | | GGATCTATTAAAA | | AUCUAUUAAAA |
| BCL11A_ | − | TTTT | 773 | AAAATATGAGTGCCTTG | 2084 | AAAAUAUGAGUGCCUUGGA |
| exon 4 | | | | GATCTATTAAAAC | | UCUAUUAAAAC |
| BCL11A_ | − | TTTA | 774 | AAATATGAGTGCCTTGG | 2085 | AAAUAUGAGUGCCUUGGAU |
| exon_4 | | | | ATCTATTAAAACC | | CUAUUAAAACC |
| BCL11A_ | − | CTTG | 775 | GATCTATTAAAACCACA | 2086 | GAUCUAUUAAAACCACAUC |
| exon 4 | | | | TCGATGGTTCTTT | | GAUGGUUCUUU |
| BCL11A_ | − | ATTA | 776 | AAACCACATCGATGGTT | 2087 | AAACCACAUCGAUGGUUCU |
| exon_4 | | | | CTTTCTACTTGTT | | UUCUACUUGUU |
| BCL11A_ | − | GTTC | 777 | TTTCTACTTGTTATAAA | 2088 | UUUCUACUUGUUAUAAACU |
| exon_4 | | | | CTTGTAGCTTAAT | | UGUAGCUUAAU |
| BCL11A_ | − | CTTT | 778 | CTACTTGTTATAAACTT | 2089 | CUACUUGUUAUAAACUUGU |
| exon_4 | | | | GTAGCTTAATTCA | | AGCUUAAUUCA |
| BCL11A_ | − | TTTC | 779 | TACTTGTTATAAACTTG | 2090 | UACUUGUUAUAAACUUGUA |
| exon_4 | | | | TAGCTTAATTCAG | | GCUUAAUUCAG |
| BCL11A_ | − | ATTG | 780 | ACAAATTAACAGAAAAA | 2091 | ACAAAUUAACAGAAAAACA |
| exon_4 | | | | CAGAACAAGTTTA | | GAACAAGUUUA |
| BCL11A_ | − | CTTG | 781 | TTATAAACTTGTAGCTT | 2092 | UUAUAAACUUGUAGCUUAA |
| exon_4 | | | | AATTCAGCATTGG | | UUCAGCAUUGG |
| BCL11A_ | − | CTTG | 782 | TAGCTTAATTCAGCATT | 2093 | UAGCUUAAUUCAGCAUUGG |
| exon 4 | | | | GGGTGAGGTAATA | | GUGAGGUAAUA |
| BCL11A_ | − | CTTA | 783 | ATTCAGCATTGGGTGAG | 2094 | AUUCAGCAUUGGGUGAGGU |
| exon 4 | | | | GTAATAAACCTTA | | AAUAAACCUUA |
| BCL11A_ | − | ATTC | 784 | AGCATTGGGTGAGGTAA | 2095 | AGCAUUGGGUGAGGUAAUA |
| exon_4 | | | | TAAACCTTAGGAA | | AACCUUAGGAA |
| BCL11A_ | − | ATTG | 785 | GGTGAGGTAATAAACCT | 2096 | GGUGAGGUAAUAAACCUUA |
| exon_4 | | | | TAGGAACTAGCAT | | GGAACUAGCAU |
| BCL11A_ | − | CTTA | 786 | GGAACTAGCATATAATT | 2097 | GGAACUAGCAUAUAAUUCU |
| exon_4 | | | | CTATATTGTATTT | | AUAUUGUAUUU |
| BCL11A_ | − | ATTC | 787 | TATATTGTATTTCTCAC | 2098 | UAUAUUGUAUUUCUCACAA |
| exon_4 | | | | AACAATGGCTACC | | CAAUGGCUACC |
| BCL11A_ | − | ATTG | 788 | TATTTCTCACAACAATG | 2099 | UAUUUCUCACAACAAUGGC |
| exon_4 | | | | GCTACCTAAAAAG | | UACCUAAAAAG |
| BCL11A_ | − | ATTT | 789 | CTCACAACAATGGCTAC | 2100 | CUCACAACAAUGGCUACCU |
| exon_4 | | | | CTAAAAAGATGAC | | AAAAAGAUGAC |
| BCL11A_ | − | TTTC | 790 | TCACAACAATGGCTACC | 2101 | UCACAACAAUGGCUACCUA |
| exon_4 | | | | TAAAAAGATGACC | | AAAAGAUGACC |
| BCL11A_ | − | ATTA | 791 | TGTCCTAGTTAATCATC | 2102 | UGUCCUAGUUAAUCAUCAU |
| exon_4 | | | | ATTTTTCCTTTAG | | UUUUCCUUUAG |
| BCL11A_ | − | GTTA | 792 | ATCATCATTTTTCCTTT | 2103 | AUCAUCAUUUUUCCUUUAG |
| exon_4 | | | | AGTTTAATTTTAT | | UUUAAUUUUAU |
| BCL11A_ | − | ATTT | 793 | TTCCTTTAGTTTAATTT | 2104 | UUCCUUUAGUUUAAUUUUA |
| exon_4 | | | | TATAAACAAAACT | | UAAACAAAACU |
| BCL11A_ | − | TTTT | 794 | TCCTTTAGTTTAATTTT | 2105 | UCCUUUAGUUUAAUUUUAU |
| exon_4 | | | | ATAAACAAAACTG | | AAACAAAACUG |
| BCL11A_ | − | TTTT | 795 | CCTTTAGTTTAATTTTA | 2106 | CCUUUAGUUUAAUUUUAUA |
| exon_4 | | | | TAAACAAAACTGA | | AACAAAACUGA |
| BCL11A_ | − | GTTA | 796 | TAAACTTGTAGCTTAAT | 2107 | UAAACUUGUAGCUUAAUUC |
| exon_4 | | | | TCAGCATTGGGTG | | AGCAUUGGGUG |
| BCL11A_ | − | CTTG | 797 | AATTGACAAATTAACAG | 2108 | AAUUGACAAAUUAACAGAA |
| exon_4 | | | | AAAAACAGAACAA | | AAACAGAACAA |
| BCL11A_ | − | ATTG | 798 | GAAAGGAAGAAAAAAGG | 2109 | GAAAGGAAGAAAAAAGGCC |
| exon_4 | | | | CCTTGAATTGACA | | UUGAAUUGACA |
| BCL11A_ | − | GTTA | 799 | AATGTATCAATTGGAAA | 2110 | AAUGUAUCAAUUGGAAAGG |
| exon_4 | | | | GGAAGAAAAAAGG | | AAGAAAAAAGG |
| BCL11A_ | − | GTTT | 800 | TTTTTTAAACTTAGACA | 2111 | UUUUUUAAACUUAGACAGC |
| exon_4 | | | | GCATGTATGGTAT | | AUGUAUGGUAU |
| BCL11A_ | − | TTTT | 801 | TTTTTAAACTTAGACAG | 2112 | UUUUUAAACUUAGACAGCA |
| exon_4 | | | | CATGTATGGTATG | | UGUAUGGUAUG |
| BCL11A_ | − | TTTT | 802 | TTTTAAACTTAGACAGC | 2113 | UUUUAAACUUAGACAGCAU |
| exon_4 | | | | ATGTATGGTATGT | | GUAUGGUAUGU |
| BCL11A_ | − | TTTT | 803 | TTTAAACTTAGACAGCA | 2114 | UUUAAACUUAGACAGCAUG |
| exon_4 | | | | TGTATGGTATGTT | | UAUGGUAUGUU |
| BCL11A_ | − | TTTT | 804 | TTAAACTTAGACAGCAT | 2115 | UUAAACUUAGACAGCAUGU |
| exon_4 | | | | GTATGGTATGTTA | | AUGGUAUGUUA |
| BCL11A_ | − | TTTT | 805 | TAAACTTAGACAGCATG | 2116 | UAAACUUAGACAGCAUGUA |
| exon_4 | | | | TATGGTATGTTAT | | UGGUAUGUUAU |
| BCL11A_ | − | TTTT | 806 | AAACTTAGACAGCATGT | 2117 | AAACUUAGACAGCAUGUAU |
| exon_4 | | | | ATGGTATGTTATG | | GGUAUGUUAUG |
| BCL11A_ | − | TTTA | 807 | AACTTAGACAGCATGTA | 2118 | AACUUAGACAGCAUGUAUG |
| exon 4 | | | | TGGTATGTTATGG | | GUAUGUUAUGG |
| BCL11A_ | − | CTTA | 808 | GACAGCATGTATGGTAT | 2119 | GACAGCAUGUAUGGUAUGU |
| exon_4 | | | | GTTATGGCTATTT | | UAUGGCUAUUU |
| BCL11A_ | − | GTTA | 809 | TGGCTATTTTAAATTGT | 2120 | UGGCUAUUUUAAAUUGUCC |
| exon_4 | | | | CCCTAATTCGTTG | | CUAAUUCGUUG |
| BCL11A_ | − | ATTT | 810 | TAAATTGTCCCTAATTC | 2121 | UAAAUUGUCCCUAAUUCGU |
| exon_4 | | | | GTTGCTGAGCAAA | | UGCUGAGCAAA |
| BCL11A_ | − | TTTT | 811 | AAATTGTCCCTAATTCG | 2122 | AAAUUGUCCCUAAUUCGUU |
| exon 4 | | | | TTGCTGAGCAAAC | | GCUGAGCAAAC |
| BCL11A_ | − | TTTA | 812 | AATTGTCCCTAATTCGT | 2123 | AAUUGUCCCUAAUUCGUUG |
| exon 4 | | | | TGCTGAGCAAACA | | CUGAGCAAACA |
| BCL11A_ | − | ATTG | 813 | TCCCTAATTCGTTGCTG | 2124 | UCCCUAAUUCGUUGCUGAG |
| exon_4 | | | | AGCAAACATGTTG | | CAAACAUGUUG |
| BCL11A_ | − | ATTC | 814 | GTTGCTGAGCAAACATG | 2125 | GUUGCUGAGCAAACAUGUU |
| exon_4 | | | | TTGCTGTTTCCAG | | GCUGUUUCCAG |
| BCL11A_ | − | GTTG | 815 | CTGAGCAAACATGTTGC | 2126 | CUGAGCAAACAUGUUGCUG |
| exon_4 | | | | TGTTTCCAGTTCC | | UUUCCAGUUCC |
| BCL11A_ | − | GTTG | 816 | CTGTTTCCAGTTCCGTT | 2127 | CUGUUUCCAGUUCCGUUCU |
| exon_4 | | | | CTGAGAGAAAAAG | | GAGAGAAAAAG |
| BCL11A_ | − | ATTA | 817 | ACCCTCTATAGACAGAA | 2128 | ACCCUCUAUAGACAGAAUA |
| exon_4 | | | | TAGATAGCACTGA | | GAUAGCACUGA |
| BCL11A_ | − | TTTG | 818 | GATTAACCCTCTATAGA | 2129 | GAUUAACCCUCUAUAGACA |
| exon 4 | | | | CAGAATAGATAGC | | GAAUAGAUAGC |
| BCL11A_ | − | CTTT | 819 | GGATTAACCCTCTATAG | 2130 | GGAUUAACCCUCUAUAGAC |
| exon 4 | | | | ACAGAATAGATAG | | AGAAUAGAUAG |
| BCL11A_ | − | TTTA | 820 | TAACGTGAGGAGGAAAA | 2131 | UAACGUGAGGAGGAAAAAC |
| exon 4 | | | | ACAGTCTTTGGAT | | AGUCUUUGGAU |
| BCL11A_ | − | TTTT | 821 | ATAACGTGAGGAGGAAA | 2132 | AUAACGUGAGGAGGAAAAA |
| exon_4 | | | | AACAGTCTTTGGA | | CAGUCUUUGGA |
| BCL11A_ | − | ATTT | 822 | TATAACGTGAGGAGGAA | 2133 | UAUAACGUGAGGAGGAAAA |
| exon_4 | | | | AAACAGTCTTTGG | | ACAGUCUUUGG |
| BCL11A_ | − | TTTC | 823 | CTTTAGTTTAATTTTAT | 2134 | CUUUAGUUUAAUUUUAUAA |
| exon 4 | | | | AAACAAAACTGAT | | ACAAAACUGAU |
| BCL11A_ | − | TTTA | 824 | TTTTATAACGTGAGGAG | 2135 | UUUUAUAACGUGAGGAGGA |
| exon 4 | | | | GAAAAACAGTCTT | | AAAACAGUCUU |
| BCL11A_ | − | GTTT | 825 | TATTTTATAACGTGAGG | 2136 | UAUUUUAUAACGUGAGGAG |
| exon_4 | | | | AGGAAAAACAGTC | | GAAAAACAGUC |
| BCL11A_ | − | ATTC | 826 | TGTAATACATATCATGT | 2137 | UGUAAUACAUAUCAUGUAC |
| exon_4 | | | | ACAGTTTTATTTT | | AGUUUUAUUUU |
| BCL11A_ | − | GTTC | 827 | TGAGAGAAAAAGAGAGA | 2138 | UGAGAGAAAAAGAGAGAGA |
| exon_4 | | | | GAGAGAGAAAAAG | | GAGAGAAAAAG |
| BCL11A_ | − | GTTC | 828 | CGTTCTGAGAGAAAAAG | 2139 | CGUUCUGAGAGAAAAAGAG |
| exon_4 | | | | AGAGAGAGAGAGA | | AGAGAGAGAGA |
| BCL11A_ | − | TTTC | 829 | CAGTTCCGTTCTGAGAG | 2140 | CAGUUCCGUUCUGAGAGAA |
| exon_4 | | | | AAAAAGAGAGAGA | | AAAGAGAGAGA |
| BCL11A_ | − | GTTT | 830 | CCAGTTCCGTTCTGAGA | 2141 | CCAGUUCCGUUCUGAGAGA |
| exon_4 | | | | GAAAAAGAGAGAG | | AAAAGAGAGAG |
| BCL11A_ | − | TTTT | 831 | ATTTTATAACGTGAGGA | 2142 | AUUUUAUAACGUGAGGAGG |
| exon_4 | | | | GGAAAAACAGTCT | | AAAAACAGUCU |
| BCL11A_ | − | CTTT | 832 | AGTTTAATTTTATAAAC | 2143 | AGUUUAAUUUUAUAAACAA |
| exon_4 | | | | AAAACTGATTATA | | AACUGAUUAUA |
| BCL11A_ | − | TTTA | 833 | GTTTAATTTTATAAACA | 2144 | GUUUAAUUUUAUAAACAAA |
| exon_4 | | | | AAACTGATTATAC | | ACUGAUUAUAC |
| BCL11A_ | − | GTTT | 834 | AATTTTATAAACAAAAC | 2145 | AAUUUUAUAAACAAAACUG |
| exon_4 | | | | TGATTATACCAGT | | AUUAUACCAGU |
| BCL11A_ | − | TTTA | 835 | AAAATACTGGCACCAAA | 2146 | AAAAUACUGGCACCAAAAG |
| exon_4 | | | | AGAAATAGATCCA | | AAAUAGAUCCA |
| BCL11A_ | − | CTTG | 836 | GTTGTCAAGTGGACAAT | 2147 | GUUGUCAAGUGGACAAUCA |
| exon_4 | | | | CAAATGATAAACT | | AAUGAUAAACU |
| BCL11A_ | − | GTTG | 837 | TCAAGTGGACAATCAAA | 2148 | UCAAGUGGACAAUCAAAUG |
| exon_4 | | | | TGATAAACTTTAA | | AUAAACUUUAA |
| BCL11A_ | − | CTTT | 838 | AAGACCTTGTATACCAT | 2149 | AAGACCUUGUAUACCAUAU |
| exon_4 | | | | ATTGAAAGGAAGA | | UGAAAGGAAGA |
| BCL11A_ | − | TTTA | 839 | AGACCTTGTATACCATA | 2150 | AGACCUUGUAUACCAUAUU |
| exon_4 | | | | TTGAAAGGAAGAG | | GAAAGGAAGAG |
| BCL11A_ | − | CTTG | 840 | TATACCATATTGAAAGG | 2151 | UAUACCAUAUUGAAAGGAA |
| exon_4 | | | | AAGAGGCTGACAA | | GAGGCUGACAA |
| BCL11A_ | − | ATTG | 841 | AAAGGAAGAGGCTGACA | 2152 | AAAGGAAGAGGCUGACAAU |
| exon 4 | | | | ATAAGGTTTGACA | | AAGGUUUGACA |
| BCL11A_ | − | GTTT | 842 | GACAGAGGGGAACAGAA | 2153 | GACAGAGGGGAACAGAAGA |
| exon_4 | | | | GAAAATAATATGA | | AAAUAAUAUGA |
| BCL11A_ | − | TTTG | 843 | ACAGAGGGGAACAGAAG | 2154 | ACAGAGGGGAACAGAAGAA |
| exon_4 | | | | AAAATAATATGAT | | AAUAAUAUGAU |
| BCL11A_ | − | ATTT | 844 | ATTAGCACAACGTGGTA | 2155 | AUUAGCACAACGUGGUACU |
| exon 4 | | | | CTATTTGCCATTT | | AUUUGCCAUUU |
| BCL11A_ | − | TTTA | 845 | TTAGCACAACGTGGTAC | 2156 | UUAGCACAACGUGGUACUA |
| exon 4 | | | | TATTTGCCATTTA | | UUUGCCAUUUA |
| BCL11A_ | − | ATTA | 846 | GCACAACGTGGTACTAT | 2157 | GCACAACGUGGUACUAUUU |
| exon 4 | | | | TTGCCATTTAAAA | | GCCAUUUAAAA |
| BCL11A_ | − | ATTT | 847 | GCCATTTAAAACTAGAA | 2158 | GCCAUUUAAAACUAGAACA |
| exon 4 | | | | CAGGTATATAAGC | | GGUAUAUAAGC |
| BCL11A_ | − | TTTG | 848 | CCATTTAAAACTAGAAC | 2159 | CCAUUUAAAACUAGAACAG |
| exon 4 | | | | AGGTATATAAGCT | | GUAUAUAAGCU |
| BCL11A_ | − | ATTT | 849 | AAAACTAGAACAGGTAT | 2160 | AAAACUAGAACAGGUAUAU |
| exon 4 | | | | ATAAGCTAATATT | | AAGCUAAUAUU |
| BCL11A_ | − | TTTA | 850 | AAACTAGAACAGGTATA | 2161 | AAACUAGAACAGGUAUAUA |
| exon 4 | | | | TAAGCTAATATTG | | AGCUAAUAUUG |
| BCL11A_ | − | ATTG | 851 | ATACAATGATGATTAAC | 2162 | AUACAAUGAUGAUUAACUA |
| exon 4 | | | | TATGAATTCTTAA | | UGAAUUCUUAA |
| BCL11A_ | − | ATTT | 852 | CTTTTCCATACACTGTG | 2163 | CUUUUCCAUACACUGUGUG |
| exon_4 | | | | TGCTATTTGTGTT | | CUAUUUGUGUU |
| BCL11A_ | − | CTTC | 853 | ATTTCTTTTCCATACAC | 2164 | AUUUCUUUUCCAUACACUG |
| exon_4 | | | | TGTGTGCTATTTG | | UGUGCUAUUUG |
| BCL11A_ | − | GTTG | 854 | TACTTCATTTCTTTTCC | 2165 | UACUUCAUUUCUUUUCCAU |
| exon_4 | | | | ATACACTGTGTGC | | ACACUGUGUGC |
| BCL11A_ | − | TTTA | 855 | AGAGTAGCAGTATATAT | 2166 | AGAGUAGCAGUAUAUAUGU |
| exon_4 | | | | GTCTGTGCTCCCT | | CUGUGCUCCCU |
| BCL11A_ | − | TTTT | 856 | AAGAGTAGCAGTATATA | 2167 | AAGAGUAGCAGUAUAUAUG |
| exon_4 | | | | TGTCTGTGCTCCC | | UCUGUGCUCCC |
| BCL11A_ | − | ATTT | 857 | TAAGAGTAGCAGTATAT | 2168 | UAAGAGUAGCAGUAUAUAU |
| exon_4 | | | | ATGTCTGTGCTCC | | GUCUGUGCUCC |
| BCL11A_ | − | TTTT | 858 | AAAAATACTGGCACCAA | 2169 | AAAAAUACUGGCACCAAAA |
| exon_4 | | | | AAGAAATAGATCC | | GAAAUAGAUCC |
| BCL11A_ | − | CTTA | 859 | AAAAAAGAAGAGAAAGA | 2170 | AAAAAAGAAGAGAAAGAAU |
| exon_4 | | | | ATTTTAAGAGTAG | | UUUAAGAGUAG |
| BCL11A_ | − | TTTA | 860 | AATGTGACATTCTTAAA | 2171 | AAUGUGACAUUCUUAAAAA |
| exon 4 | | | | AAAAGAAGAGAAA | | AAGAAGAGAAA |
| BCL11A_ | − | ATTT | 861 | AAATGTGACATTCTTAA | 2172 | AAAUGUGACAUUCUUAAAA |
| exon_4 | | | | AAAAAGAAGAGAA | | AAAGAAGAGAA |
| BCL11A_ | − | CTTG | 862 | CATTTAAATGTGACATT | 2173 | CAUUUAAAUGUGACAUUCU |
| exon 4 | | | | CTTAAAAAAAGAA | | UAAAAAAAGAA |
| BCL11A_ | − | CTTA | 863 | AGACTTGCATTTAAATG | 2174 | AGACUUGCAUUUAAAUGUG |
| exon_4 | | | | TGACATTCTTAAA | | ACAUUCUUAAA |
| BCL11A_ | − | ATTC | 864 | TTAAGACTTGCATTTAA | 2175 | UUAAGACUUGCAUUUAAAU |
| exon_4 | | | | ATGTGACATTCTT | | GUGACAUUCUU |
| BCL11A_ | − | ATTA | 865 | ACTATGAATTCTTAAGA | 2176 | ACUAUGAAUUCUUAAGACU |
| exon_4 | | | | CTTGCATTTAAAT | | UGCAUUUAAAU |
| BCL11A_ | − | ATTC | 866 | TTAAAAAAAGAAGAGAA | 2177 | UUAAAAAAAGAAGAGAAAG |
| exon_4 | | | | AGAATTTTAAGAG | | AAUUUUAAGAG |
| BCL11A_ | − | GTTG | 867 | TGTATGTTTTTTTTTAA | 2178 | UGUAUGUUUUUUUUUAAAC |
| exon_4 | | | | ACTTAGACAGCAT | | UUAGACAGCAU |
| BCL11A_ | − | TTTT | 868 | TAAAAATACTGGCACCA | 2179 | UAAAAAUACUGGCACCAAA |
| exon_4 | | | | AAAGAAATAGATC | | AGAAAUAGAUC |
| BCL11A_ | − | TTTA | 869 | ATAATGTCTTTTTAAAA | 2180 | AUAAUGUCUUUUUAAAAAU |
| exon_4 | | | | ATACTGGCACCAA | | ACUGGCACCAA |
| BCL11A_ | − | TTTA | 870 | ATTTTATAAACAAAACT | 2181 | AUUUUAUAAACAAAACUGA |
| exon 4 | | | | GATTATACCAGTA | | UUAUACCAGUA |
| BCL11A_ | − | ATTT | 871 | TATAAACAAAACTGATT | 2182 | UAUAAACAAAACUGAUUAU |
| exon_4 | | | | ATACCAGTATAAA | | ACCAGUAUAAA |
| BCL11A_ | − | TTTT | 872 | ATAAACAAAACTGATTA | 2183 | AUAAACAAAACUGAUUAUA |
| exon_4 | | | | TACCAGTATAAAA | | CCAGUAUAAAA |
| BCL11A_ | − | TTTA | 873 | TAAACAAAACTGATTAT | 2184 | UAAACAAAACUGAUUAUAC |
| exon_4 | | | | ACCAGTATAAAAG | | CAGUAUAAAAG |
| BCL11A_ | − | ATTA | 874 | TACCAGTATAAAAGCTA | 2185 | UACCAGUAUAAAAGCUACU |
| exon_4 | | | | CTTTGCTCCTGGT | | UUGCUCCUGGU |
| BCL11A_ | − | CTTT | 875 | GCTCCTGGTGAGAGCTT | 2186 | GCUCCUGGUGAGAGCUUAA |
| exon_4 | | | | AAAAGAAATGGGC | | AAGAAAUGGGC |
| BCL11A_ | − | TTTG | 876 | CTCCTGGTGAGAGCTTA | 2187 | CUCCUGGUGAGAGCUUAAA |
| exon_4 | | | | AAAGAAATGGGCT | | AGAAAUGGGCU |
| BCL11A_ | − | CTTA | 877 | AAAGAAATGGGCTGTTT | 2188 | AAAGAAAUGGGCUGUUUUG |
| exon_4 | | | | TGCCCAAAGTTTT | | CCCAAAGUUUU |
| BCL11A_ | − | GTTT | 878 | TGCCCAAAGTTTTATTT | 2189 | UGCCCAAAGUUUUAUUUUU |
| exon_4 | | | | TTTTTAAACAATG | | UUUAAACAAUG |
| BCL11A_ | − | TTTT | 879 | GCCCAAAGTTTTATTTT | 2190 | GCCCAAAGUUUUAUUUUUU |
| exon_4 | | | | TTTTAAACAATGA | | UUAAACAAUGA |
| BCL11A_ | − | TTTG | 880 | CCCAAAGTTTTATTTTT | 2191 | CCCAAAGUUUUAUUUUUUU |
| exon_4 | | | | TTTAAACAATGAT | | UAAACAAUGAU |
| BCL11A_ | − | GTTT | 881 | TATTTTTTTTAAACAAT | 2192 | UAUUUUUUUUAAACAAUGA |
| exon_4 | | | | GATTAAATTGAAT | | UUAAAUUGAAU |
| BCL11A_ | − | TTTT | 882 | ATTTTTTTTAAACAATG | 2193 | AUUUUUUUUAAACAAUGAU |
| exon_4 | | | | ATTAAATTGAATG | | UAAAUUGAAUG |
| BCL11A_ | − | TTTA | 883 | TTTTTTTTAAACAATGA | 2194 | UUUUUUUUAAACAAUGAUU |
| exon_4 | | | | TTAAATTGAATGT | | AAAUUGAAUGU |
| BCL11A_ | − | ATTT | 884 | TTTTTAAACAATGATTA | 2195 | UUUUUAAACAAUGAUUAAA |
| exon 4 | | | | AATTGAATGTGTA | | UUGAAUGUGUA |
| BCL11A_ | − | TTTT | 885 | TTTTAAACAATGATTAA | 2196 | UUUUAAACAAUGAUUAAAU |
| exon_4 | | | | ATTGAATGTGTAA | | UGAAUGUGUAA |
| BCL11A_ | − | TTTT | 886 | TTTAAACAATGATTAAA | 2197 | UUUAAACAAUGAUUAAAUU |
| exon_4 | | | | TTGAATGTGTAAT | | GAAUGUGUAAU |
| BCL11A_ | − | CTTT | 887 | AATAATGTCTTTTTAAA | 2198 | AAUAAUGUCUUUUUAAAAA |
| exon_4 | | | | AATACTGGCACCA | | UACUGGCACCA |
| BCL11A_ | − | TTTG | 888 | CTTTAATAATGTCTTTT | 2199 | CUUUAAUAAUGUCUUUUUA |
| exon 4 | | | | TAAAAATACTGGC | | AAAAUACUGGC |
| BCL11A_ | − | ATTT | 889 | GCTTTAATAATGTCTTT | 2200 | GCUUUAAUAAUGUCUUUUU |
| exon 4 | | | | TTAAAAATACTGG | | AAAAAUACUGG |
| BCL11A_ | − | TTTA | 890 | TGAAGATATTTGCTTTA | 2201 | UGAAGAUAUUUGCUUUAAU |
| exon_4 | | | | ATAATGTCTTTTT | | AAUGUCUUUUU |
| BCL11A_ | − | TTTT | 891 | ATGAAGATATTTGCTTT | 2202 | AUGAAGAUAUUUGCUUUAA |
| exon_4 | | | | AATAATGTCTTTT | | UAAUGUCUUUU |
| BCL11A_ | − | ATTT | 892 | TATGAAGATATTTGCTT | 2203 | UAUGAAGAUAUUUGCUUUA |
| exon_4 | | | | TAATAATGTCTTT | | AUAAUGUCUUU |
| BCL11A_ | − | CTTT | 893 | TTAAAAATACTGGCACC | 2204 | UUAAAAAUACUGGCACCAA |
| exon_4 | | | | AAAAGAAATAGAT | | AAGAAAUAGAU |
| BCL11A_ | − | GTTC | 894 | ATTTTATGAAGATATTT | 2205 | AUUUUAUGAAGAUAUUUGC |
| exon_4 | | | | GCTTTAATAATGT | | UUUAAUAAUGU |
| BCL11A_ | − | ATTG | 895 | AATGTGTAATGTGCAAA | 2206 | AAUGUGUAAUGUGCAAAAG |
| exon_4 | | | | AGCCCTGGAACGC | | CCCUGGAACGC |
| BCL11A_ | − | ATTA | 896 | AATTGAATGTGTAATGT | 2207 | AAUUGAAUGUGUAAUGUGC |
| exon_4 | | | | GCAAAAGCCCTGG | | AAAAGCCCUGG |
| BCL11A_ | − | TTTA | 897 | AACAATGATTAAATTGA | 2208 | AACAAUGAUUAAAUUGAAU |
| exon_4 | | | | ATGTGTAATGTGC | | GUGUAAUGUGC |
| BCL11A_ | − | TTTT | 898 | AAACAATGATTAAATTG | 2209 | AAACAAUGAUUAAAUUGAA |
| exon_4 | | | | AATGTGTAATGTG | | UGUGUAAUGUG |
| BCL11A_ | − | TTTT | 899 | TAAACAATGATTAAATT | 2210 | UAAACAAUGAUUAAAUUGA |
| exon 4 | | | | GAATGTGTAATGT | | AUGUGUAAUGU |
| BCL11A_ | − | TTTT | 900 | TTAAACAATGATTAAAT | 2211 | UUAAACAAUGAUUAAAUUG |
| exon 4 | | | | TGAATGTGTAATG | | AAUGUGUAAUG |
| BCL11A_ | − | ATTA | 901 | AATACACTAGTAAGGAG | 2212 | AAUACACUAGUAAGGAGUU |
| exon_4 | | | | TTCATTTTATGAA | | CAUUUUAUGAA |
| BCL11A_ | − | TTTA | 902 | CATGTTGTGTATGTTTT | 2213 | CAUGUUGUGUAUGUUUUUU |
| exon_4 | | | | TTTTTAAACTTAG | | UUUAAACUUAG |
| BCL11A_ | − | ATTT | 903 | ACATGTTGTGTATGTTT | 2214 | ACAUGUUGUGUAUGUUUUU |
| exon_4 | | | | TTTTTTAAACTTA | | UUUUAAACUUA |
| BCL11A_ | − | CTTG | 904 | TGCAATAATTTACATGT | 2215 | UGCAAUAAUUUACAUGUUG |
| exon_4 | | | | TGTGTATGTTTTT | | UGUAUGUUUUU |
| BCL11A_ | − | ATTC | 905 | CAGCCAGGTAGCAAGCC | 2216 | CAGCCAGGUAGCAAGCCGC |
| exon_4 | | | | GCCCTTCCTGGCG | | CCUUCCUGGCG |
| BCL11A_ | − | CTTC | 906 | CTGGCGACGCCCCCCCT | 2217 | CUGGCGACGCCCCCCCUCC |
| exon_4 | | | | CCCTCCTCTGCAA | | CUCCUCUGCAA |
| BCL11A_ | − | GTTC | 907 | TGCGGCAAGACGTTCAA | 2218 | UGCGGCAAGACGUUCAAAU |
| exon_4 | | | | ATTTCAGAGCAAC | | UUCAGAGCAAC |
| BCL11A_ | − | GTTC | 908 | AAATTTCAGAGCAACCT | 2219 | AAAUUUCAGAGCAACCUGG |
| exon_4 | | | | GGTGGTGCACCGG | | UGGUGCACCGG |
| BCL11A_ | − | ATTT | 909 | CAGAGCAACCTGGTGGT | 2220 | CAGAGCAACCUGGUGGUGC |
| exon_4 | | | | GCACCGGCGCAGC | | ACCGGCGCAGC |
| BCL11A_ | − | TTTC | 910 | AGAGCAACCTGGTGGTG | 2221 | AGAGCAACCUGGUGGUGCA |
| exon_4 | | | | CACCGGCGCAGCC | | CCGGCGCAGCC |
| BCL11A_ | − | CTTG | 911 | GTGGGCAGCGCCAGCAG | 2222 | GUGGGCAGCGCCAGCAGCG |
| exon_4 | | | | CGCGCTCAAGTCC | | CGCUCAAGUCC |
| BCL11A_ | − | GTTC | 912 | AAGAGCGAGAACGACCC | 2223 | AAGAGCGAGAACGACCCCA |
| exon_4 | | | | CAACCTGATCCCG | | ACCUGAUCCCG |
| BCL11A_ | − | CTTC | 913 | GGGCTGAGCCTGGAGGC | 2224 | GGGCUGAGCCUGGAGGCGG |
| exon_4 | | | | GGCGCGCCACCAC | | CGCGCCACCAC |
| BCL11A_ | − | CTTC | 914 | AGCGAGGCCTTCCACCA | 2225 | AGCGAGGCCUUCCACCAGG |
| exon_4 | | | | GGTCCTGGGCGAG | | UCCUGGGCGAG |
| BCL11A_ | − | CTTC | 915 | CACCAGGTCCTGGGCGA | 2226 | CACCAGGUCCUGGGCGAGA |
| exon_4 | | | | GAAGCATAAGCGC | | AGCAUAAGCGC |
| BCL11A_ | − | CTTG | 916 | CGACGAAGACTCGGTGG | 2227 | CGACGAAGACUCGGUGGCC |
| exon_4 | | | | CCGGCGAGTCGGA | | GGCGAGUCGGA |
| BCL11A_ | − | GTTA | 917 | ATGGCCGCGGCTGCTCC | 2228 | AUGGCCGCGGCUGCUCCCC |
| exon_4 | | | | CCGGGCGAGTCGG | | GGGCGAGUCGG |
| BCL11A_ | − | CTTC | 918 | TCTAAGCGCATCAAGCT | 2229 | UCUAAGCGCAUCAAGCUCG |
| exon_4 | | | | CGAGAAGGAGTTC | | AGAAGGAGUUC |
| BCL11A_ | − | GTTC | 919 | GACCTGCCCCCGGCCGC | 2230 | GACCUGCCCCCGGCCGCGA |
| exon_4 | | | | GATGCCCAACACG | | UGCCCAACACG |
| BCL11A_ | − | CTTC | 920 | CTTAGCTTCGGAGACTC | 2231 | CUUAGCUUCGGAGACUCCA |
| exon_4 | | | | CAGACAATCGCCT | | GACAAUCGCCU |
| BCL11A_ | − | CTTA | 921 | GCTTCGGAGACTCCAGA | 2232 | GCUUCGGAGACUCCAGACA |
| exon 4 | | | | CAATCGCCTTTTG | | AUCGCCUUUUG |
| BCL11A_ | − | ATTT | 922 | GTAAGATGCCTTTTAGC | 2233 | GUAAGAUGCCUUUUAGCGU |
| exon_4 | | | | GTGTACAGTACCC | | GUACAGUACCC |
| BCL11A_ | − | TTTA | 923 | CAAATGTGAAATTTGTA | 2234 | CAAAUGUGAAAUUUGUAAG |
| exon 4 | | | | AGATGCCTTTTAG | | AUGCCUUUUAG |
| BCL11A_ | − | GTTT | 924 | ACAAATGTGAAATTTGT | 2235 | ACAAAUGUGAAAUUUGUAA |
| exon_4 | | | | AAGATGCCTTTTA | | GAUGCCUUUUA |
| BCL11A_ | − | CTTA | 925 | TAAATGCGAGCTGTGCA | 2236 | UAAAUGCGAGCUGUGCAAC |
| exon 4 | | | | ACTATGCCTGTGC | | UAUGCCUGUGC |
| BCL11A_ | − | CTTC | 926 | AAGAACTGTAGCAATCT | 2237 | AAGAACUGUAGCAAUCUCA |
| exon_4 | | | | CACTGTCCACAGG | | CUGUCCACAGG |
| BCL11A_ | − | CTTG | 927 | TGAGTACTGTGGGAAAG | 2238 | UGAGUACUGUGGGAAAGUC |
| exon 4 | | | | TCTTCAAGAACTG | | UUCAAGAACUG |
| BCL11A_ | − | GTTA | 928 | CTGCAACCATTCCAGCC | 2239 | CUGCAACCAUUCCAGCCAG |
| exon 4 | | | | AGGTAGCAAGCCG | | GUAGCAAGCCG |
| BCL11A_ | − | ATTA | 929 | GTGGTCCGGGCCCGGGC | 2240 | GUGGUCCGGGCCCGGGCAG |
| exon_4 | | | | AGGCCCAGCTCAA | | GCCCAGCUCAA |
| BCL11A_ | − | TTTG | 930 | CGCTTCTCCACACCGCC | 2241 | CGCUUCUCCACACCGCCCG |
| exon_4 | | | | CGGGGAGCTGGAC | | GGGAGCUGGAC |
| BCL11A_ | − | GTTT | 931 | GCGCTTCTCCACACCGC | 2242 | GCGCUUCUCCACACCGCCC |
| exon_4 | | | | CCGGGGAGCTGGA | | GGGGAGCUGGA |
| BCL11A_ | − | TTTG | 932 | CCTCCTCGTCGGAGCAC | 2243 | CCUCCUCGUCGGAGCACUC |
| exon_4 | | | | TCCTCGGAGAACG | | CUCGGAGAACG |
| BCL11A_ | − | TTTT | 933 | GCCTCCTCGTCGGAGCA | 2244 | GCCUCCUCGUCGGAGCACU |
| exon_4 | | | | CTCCTCGGAGAAC | | CCUCGGAGAAC |
| BCL11A_ | − | CTTT | 934 | TGCCTCCTCGTCGGAGC | 2245 | UGCCUCCUCGUCGGAGCAC |
| exon_4 | | | | ACTCCTCGGAGAA | | UCCUCGGAGAA |
| BCL11A_ | − | CTTC | 935 | GGAGACTCCAGACAATC | 2246 | GGAGACUCCAGACAAUCGC |
| exon_4 | | | | GCCTTTTGCCTCC | | CUUUUGCCUCC |
| BCL11A_ | − | CTTC | 936 | TCCACACCGCCCGGGGA | 2247 | UCCACACCGCCCGGGGAGC |
| exon 4 | | | | GCTGGACGGAGGG | | UGGACGGAGGG |
| BCL11A_ | − | TTTG | 937 | TAAGATGCCTTTTAGCG | 2248 | UAAGAUGCCUUUUAGCGUG |
| exon_4 | | | | TGTACAGTACCCT | | UACAGUACCCU |
| BCL11A_ | − | CTTA | 938 | GAGAGCTGGCAGGGAAC | 2249 | GAGAGCUGGCAGGGAACAC |
| exon_4 | | | | ACGTCTAGCCCAC | | GUCUAGCCCAC |
| BCL11A_ | − | ATTT | 939 | CTCTAGGAGACTTAGAG | 2250 | CUCUAGGAGACUUAGAGAG |
| exon_4 | | | | AGCTGGCAGGGAA | | CUGGCAGGGAA |
| BCL11A_ | − | ATTA | 940 | AACATTGATGTTGGTGT | 2251 | AACAUUGAUGUUGGUGUUG |
| exon 4 | | | | TGTATTATTTTGC | | UAUUAUUUUGC |
| BCL11A_ | − | ATTG | 941 | ATGTTGGTGTTGTATTA | 2252 | AUGUUGGUGUUGUAUUAUU |
| exon 4 | | | | TTTTGCAGGTAAA | | UUGCAGGUAAA |
| BCL11A_ | − | GTTG | 942 | GTGTTGTATTATTTTGC | 2253 | GUGUUGUAUUAUUUUGCAG |
| exon_4 | | | | AGGTAAAGATGAG | | GUAAAGAUGAG |
| BCL11A_ | − | GTTG | 943 | TATTATTTTGCAGGTAA | 2254 | UAUUAUUUUGCAGGUAAAG |
| exon_4 | | | | AGATGAGCCCAGC | | AUGAGCCCAGC |
| BCL11A_ | − | ATTA | 944 | TTTTGCAGGTAAAGATG | 2255 | UUUUGCAGGUAAAGAUGAG |
| exon_4 | | | | AGCCCAGCAGCTA | | CCCAGCAGCUA |
| BCL11A_ | − | ATTT | 945 | TGCAGGTAAAGATGAGC | 2256 | UGCAGGUAAAGAUGAGCCC |
| exon_4 | | | | CCAGCAGCTACAC | | AGCAGCUACAC |
| BCL11A_ | − | TTTT | 946 | GCAGGTAAAGATGAGCC | 2257 | GCAGGUAAAGAUGAGCCCA |
| exon_4 | | | | CAGCAGCTACACA | | GCAGCUACACA |
| BCL11A_ | − | TTTG | 947 | CAGGTAAAGATGAGCCC | 2258 | CAGGUAAAGAUGAGCCCAG |
| exon_4 | | | | AGCAGCTACACAT | | CAGCUACACAU |
| BCL11A_ | − | CTTG | 948 | CAAACAGCCATTCACCA | 2259 | CAAACAGCCAUUCACCAGU |
| exon 4 | | | | GTGCATGGTTTCT | | GCAUGGUUUCU |
| BCL11A_ | − | ATTC | 949 | ACCAGTGCATGGTTTCT | 2260 | ACCAGUGCAUGGUUUCUCU |
| exon_4 | | | | CTTGCAACACGCA | | UGCAACACGCA |
| BCL11A_ | − | GTTT | 950 | CTCTTGCAACACGCACA | 2261 | CUCUUGCAACACGCACAGA |
| exon_4 | | | | GAACACTCATGGA | | ACACUCAUGGA |
| BCL11A_ | − | TTTC | 951 | TCTTGCAACACGCACAG | 2262 | UCUUGCAACACGCACAGAA |
| exon_4 | | | | AACACTCATGGAT | | CACUCAUGGAU |
| BCL11A_ | − | CTTG | 952 | CAACACGCACAGAACAC | 2263 | CAACACGCACAGAACACUC |
| exon_4 | | | | TCATGGATTAAGA | | AUGGAUUAAGA |
| BCL11A_ | − | ATTA | 953 | AGAATCTACTTAGAAAG | 2264 | AGAAUCUACUUAGAAAGCG |
| exon_4 | | | | CGAACACGGAAGT | | AACACGGAAGU |
| BCL11A_ | − | CTTA | 954 | GAAAGCGAACACGGAAG | 2265 | GAAAGCGAACACGGAAGUC |
| exon 4 | | | | TCCCCTGACCCCG | | CCCUGACCCCG |
| BCL11A_ | − | GTTG | 955 | GTATCCCTTCAGGACTA | 2266 | GUAUCCCUUCAGGACUAGG |
| exon 4 | | | | GGTGCAGAATGTC | | UGCAGAAUGUC |
| BCL11A_ | − | CTTC | 956 | AGGACTAGGTGCAGAAT | 2267 | AGGACUAGGUGCAGAAUGU |
| exon_4 | | | | GTCCTTCCCAGCC | | CCUUCCCAGCC |
| BCL11A_ | − | GTTG | 957 | AATCCAATGGCTATGGA | 2268 | AAUCCAAUGGCUAUGGAGC |
| exon_4 | | | | GCCTCCCGCCATG | | CUCCCGCCAUG |
| BCL11A_ | − | TTTG | 958 | ACAGGGTGCTGCGGTTG | 2269 | ACAGGGUGCUGCGGUUGAA |
| exon_4 | | | | AATCCAATGGCTA | | UCCAAUGGCUA |
| BCL11A_ | − | CTTT | 959 | GACAGGGTGCTGCGGTT | 2270 | GACAGGGUGCUGCGGUUGA |
| exon_4 | | | | GAATCCAATGGCT | | AUCCAAUGGCU |
| BCL11A_ | − | CTTG | 960 | GACCCCCACCGCATAGA | 2271 | GACCCCCACCGCAUAGAGC |
| exon_4 | | | | GCGCCTGGGGGCG | | GCCUGGGGGCG |
| BCL11A_ | − | TTTA | 961 | GTCCACCACCGAGACAT | 2272 | GUCCACCACCGAGACAUCA |
| exon_4 | | | | CACTTGGACCCCC | | CUUGGACCCCC |
| BCL11A_ | − | GTTT | 962 | AGTCCACCACCGAGACA | 2273 | AGUCCACCACCGAGACAUC |
| exon_4 | | | | TCACTTGGACCCC | | ACUUGGACCCC |
| BCL11A_ | − | TTTC | 963 | TCTAGGAGACTTAGAGA | 2274 | UCUAGGAGACUUAGAGAGC |
| exon_4 | | | | GCTGGCAGGGAAC | | UGGCAGGGAAC |
| BCL11A_ | − | TTTC | 964 | CACCCACTCCCCCCCTG | 2275 | CACCCACUCCCCCCCUGUU |
| exon_4 | | | | TTTAGTCCACCAC | | UAGUCCACCAC |
| BCL11A_ | − | CTTC | 965 | CGGCCTGGCAGAAGGGC | 2276 | CGGCCUGGCAGAAGGGCGC |
| exon_4 | | | | GCTTTCCACCCAC | | UUUCCACCCAC |
| BCL11A_ | − | TTTA | 966 | ACCTGCTAAGAATACCA | 2277 | ACCUGCUAAGAAUACCAGG |
| exon 4 | | | | GGATCAGTATCGA | | AUCAGUAUCGA |
| BCL11A_ | − | CTTT | 967 | AACCTGCTAAGAATACC | 2278 | AACCUGCUAAGAAUACCAG |
| exon 4 | | | | AGGATCAGTATCG | | GAUCAGUAUCG |
| BCL11A_ | − | ATTG | 968 | CAGACAATAACCCCTTT | 2279 | CAGACAAUAACCCCUUUAA |
| exon 4 | | | | AACCTGCTAAGAA | | CCUGCUAAGAA |
| BCL11A_ | − | ATTC | 969 | ATATTGCAGACAATAAC | 2280 | AUAUUGCAGACAAUAACCC |
| exon 4 | | | | CCCTTTAACCTGC | | CUUUAACCUGC |
| BCL11A_ | − | CTTC | 970 | CCAGCCACCTCTCCATG | 2281 | CCAGCCACCUCUCCAUGGG |
| exon 4 | | | | GGATTCATATTGC | | AUUCAUAUUGC |
| BCL11A_ | − | CTTT | 971 | CCACCCACTCCCCCCCT | 2282 | CCACCCACUCCCCCCCUGU |
| exon_4 | | | | GTTTAGTCCACCA | | UUAGUCCACCA |
| BCL11A_ | − | TTTC | 972 | TTTTCCATACACTGTGT | 2283 | UUUUCCAUACACUGUGUGC |
| exon_4 | | | | GCTATTTGTGTTA | | UAUUUGUGUUA |
| BCL11A_ | − | CTTT | 973 | TAGCGTGTACAGTACCC | 2284 | UAGCGUGUACAGUACCCUG |
| exon_4 | | | | TGGAGAAACACAT | | GAGAAACACAU |
| BCL11A_ | − | TTTA | 974 | GCGTGTACAGTACCCTG | 2285 | GCGUGUACAGUACCCUGGA |
| exon_4 | | | | GAGAAACACATGA | | GAAACACAUGA |
| BCL11A_ | − | TTTC | 975 | TTTTTCCTTTTTTTTTT | 2286 | UUUUUCCUUUUUUUUUUUU |
| exon_4 | | | | TTTTCCTTTATGT | | UUCCUUUAUGU |
| BCL11A_ | − | CTTT | 976 | TTCCTTTTTTTTTTTTT | 2287 | UUCCUUUUUUUUUUUUUUC |
| exon_4 | | | | TCCTTTATGTTCT | | CUUUAUGUUCU |
| BCL11A_ | − | TTTT | 977 | TCCTTTTTTTTTTTTTT | 2288 | UCCUUUUUUUUUUUUUUCC |
| exon_4 | | | | CCTTTATGTTCTC | | UUUAUGUUCUC |
| BCL11A_ | − | TTTT | 978 | CCTTTTTTTTTTTTTTC | 2289 | CCUUUUUUUUUUUUUUCCU |
| exon_4 | | | | CTTTATGTTCTCA | | UUAUGUUCUCA |
| BCL11A_ | − | TTTC | 979 | CTTTTTTTTTTTTTTCC | 2290 | CUUUUUUUUUUUUUUCCUU |
| exon_4 | | | | TTTATGTTCTCAC | | UAUGUUCUCAC |
| BCL11A_ | − | CTTT | 980 | TTTTTTTTTTTCCTTTA | 2291 | UUUUUUUUUUUCCUUUAUG |
| exon 4 | | | | TGTTCTCACCGTT | | UUCUCACCGUU |
| BCL11A_ | − | TTTT | 981 | TTTTTTTTTTCCTTTAT | 2292 | UUUUUUUUUUCCUUUAUGU |
| exon 4 | | | | GTTCTCACCGTTT | | UCUCACCGUUU |
| BCL11A_ | − | TTTT | 982 | TTTTTTTTTCCTTTATG | 2293 | UUUUUUUUUCCUUUAUGUU |
| exon_4 | | | | TTCTCACCGTTTG | | CUCACCGUUUG |
| BCL11A_ | − | TTTT | 983 | TTTTTTTTCCTTTATGT | 2294 | UUUUUUUUCCUUUAUGUUC |
| exon 4 | | | | TCTCACCGTTTGA | | UCACCGUUUGA |
| BCL11A_ | − | TTTT | 984 | TTTTTTTCCTTTATGTT | 2295 | UUUUUUUCCUUUAUGUUCU |
| exon 4 | | | | CTCACCGTTTGAA | | CACCGUUUGAA |
| BCL11A_ | − | TTTT | 985 | TTTTTTCCTTTATGTTC | 2296 | UUUUUUCCUUUAUGUUCUC |
| exon_4 | | | | TCACCGTTTGAAT | | ACCGUUUGAAU |
| BCL11A_ | − | TTTT | 986 | TTTTTCCTTTATGTTCT | 2297 | UUUUUCCUUUAUGUUCUCA |
| exon 4 | | | | CACCGTTTGAATG | | CCGUUUGAAUG |
| BCL11A_ | − | TTTT | 987 | TTTTCCTTTATGTTCTC | 2298 | UUUUCCUUUAUGUUCUCAC |
| exon_4 | | | | ACCGTTTGAATGC | | CGUUUGAAUGC |
| BCL11A_ | − | TTTT | 988 | TTTCCTTTATGTTCTCA | 2299 | UUUCCUUUAUGUUCUCACC |
| exon_4 | | | | CCGTTTGAATGCA | | GUUUGAAUGCA |
| BCL11A_ | − | TTTT | 989 | TTCCTTTATGTTCTCAC | 2300 | UUCCUUUAUGUUCUCACCG |
| exon 4 | | | | CGTTTGAATGCAT | | UUUGAAUGCAU |
| BCL11A_ | − | TTTT | 990 | TCCTTTATGTTCTCACC | 2301 | UCCUUUAUGUUCUCACCGU |
| exon 4 | | | | GTTTGAATGCATG | | UUGAAUGCAUG |
| BCL11A_ | − | TTTT | 991 | CCTTTATGTTCTCACCG | 2302 | CCUUUAUGUUCUCACCGUU |
| exon_4 | | | | TTTGAATGCATGA | | UGAAUGCAUGA |
| BCL11A_ | − | TTTC | 992 | TCTTGTGCAATAATTTA | 2303 | UCUUGUGCAAUAAUUUACA |
| exon_4 | | | | CATGTTGTGTATG | | UGUUGUGUAUG |
| BCL11A_ | − | CTTT | 993 | CTCTTGTGCAATAATTT | 2304 | CUCUUGUGCAAUAAUUUAC |
| exon 4 | | | | ACATGTTGTGTAT | | AUGUUGUGUAU |
| BCL11A_ | − | TTTG | 994 | AGCCTTTCTCTTGTGCA | 2305 | AGCCUUUCUCUUGUGCAAU |
| exon_4 | | | | ATAATTTACATGT | | AAUUUACAUGU |
| BCL11A_ | − | CTTT | 995 | GAGCCTTTCTCTTGTGC | 2306 | GAGCCUUUCUCUUGUGCAA |
| exon_4 | | | | AATAATTTACATG | | UAAUUUACAUG |
| BCL11A_ | − | TTTA | 996 | CGCAAACTTTGAGCCTT | 2307 | CGCAAACUUUGAGCCUUUC |
| exon_4 | | | | TCTCTTGTGCAAT | | UCUUGUGCAAU |
| BCL11A_ | − | TTTT | 997 | ACGCAAACTTTGAGCCT | 2308 | ACGCAAACUUUGAGCCUUU |
| exon_4 | | | | TTCTCTTGTGCAA | | CUCUUGUGCAA |
| BCL11A_ | − | TTTT | 998 | CTTTTTCCTTTTTTTTT | 2309 | CUUUUUCCUUUUUUUUUUU |
| exon_4 | | | | TTTTTCCTTTATG | | UUUCCUUUAUG |
| BCL11A_ | − | ATTT | 999 | TACGCAAACTTTGAGCC | 2310 | UACGCAAACUUUGAGCCUU |
| exon_4 | | | | TTTCTCTTGTGCA | | UCUCUUGUGCA |
| BCL11A_ | − | TTTG | 1000 | AATGCATGATCTGTATG | 2311 | AAUGCAUGAUCUGUAUGGG |
| exon_4 | | | | GGGCAATACTATT | | GCAAUACUAUU |
| BCL11A_ | − | GTTT | 1001 | GAATGCATGATCTGTAT | 2312 | GAAUGCAUGAUCUGUAUGG |
| exon_4 | | | | GGGGCAATACTAT | | GGCAAUACUAU |
| BCL11A_ | − | GTTC | 1002 | TCACCGTTTGAATGCAT | 2313 | UCACCGUUUGAAUGCAUGA |
| exon_4 | | | | GATCTGTATGGGG | | UCUGUAUGGGG |
| BCL11A_ | − | TTTA | 1003 | TGTTCTCACCGTTTGAA | 2314 | UGUUCUCACCGUUUGAAUG |
| exon_4 | | | | TGCATGATCTGTA | | CAUGAUCUGUA |
| BCL11A_ | − | CTTT | 1004 | ATGTTCTCACCGTTTGA | 2315 | AUGUUCUCACCGUUUGAAU |
| exon_4 | | | | ATGCATGATCTGT | | GCAUGAUCUGU |
| BCL11A_ | − | TTTC | 1005 | CTTTATGTTCTCACCGT | 2316 | CUUUAUGUUCUCACCGUUU |
| exon_4 | | | | TTGAATGCATGAT | | GAAUGCAUGAU |
| BCL11A_ | − | ATTG | 1006 | CATTTTACGCAAACTTT | 2317 | CAUUUUACGCAAACUUUGA |
| exon_4 | | | | GAGCCTTTCTCTT | | GCCUUUCUCUU |
| BCL11A_ | − | TTTT | 1007 | AGCGTGTACAGTACCCT | 2318 | AGCGUGUACAGUACCCUGG |
| exon_4 | | | | GGAGAAACACATG | | AGAAACACAUG |
| BCL11A_ | − | TTTT | 1008 | TCTTTTTCCTTTTTTTT | 2319 | UCUUUUUCCUUUUUUUUUU |
| exon_4 | | | | TTTTTTCCTTTAT | | UUUUCCUUUAU |
| BCL11A_ | − | CTTT | 1009 | TTTCTTTTTCCTTTTTT | 2320 | UUUCUUUUUCCUUUUUUUU |
| exon_4 | | | | TTTTTTTTCCTTT | | UUUUUUCCUUU |
| BCL11A_ | − | GTTG | 1010 | AATAATGATATAAAAAC | 2321 | AAUAAUGAUAUAAAAACUG |
| exon_4 | | | | TGAATAGAGGTAT | | AAUAGAGGUAU |
| BCL11A_ | − | ATTA | 1011 | ATACCCCTCCCTCACTC | 2322 | AUACCCCUCCCUCACUCCC |
| exon_4 | | | | CCACCTGACACCC | | ACCUGACACCC |
| BCL11A_ | − | CTTT | 1012 | TTCACCACTCCCCTTCC | 2323 | UUCACCACUCCCCUUCCCC |
| exon_4 | | | | CCATCGCCCTCCA | | AUCGCCCUCCA |
| BCL11A_ | − | TTTT | 1013 | TCACCACTCCCCTTCCC | 2324 | UCACCACUCCCCUUCCCCA |
| exon 4 | | | | CATCGCCCTCCAG | | UCGCCCUCCAG |
| BCL11A_ | − | TTTT | 1014 | CACCACTCCCCTTCCCC | 2325 | CACCACUCCCCUUCCCCAU |
| exon_4 | | | | ATCGCCCTCCAGC | | CGCCCUCCAGC |
| BCL11A_ | − | TTTC | 1015 | ACCACTCCCCTTCCCCA | 2326 | ACCACUCCCCUUCCCCAUC |
| exon 4 | | | | TCGCCCTCCAGCC | | GCCCUCCAGCC |
| BCL11A_ | − | CTTC | 1016 | CCCATCGCCCTCCAGCC | 2327 | CCCAUCGCCCUCCAGCCCC |
| exon_4 | | | | CCACTCCCTGTAG | | ACUCCCUGUAG |
| BCL11A_ | − | ATTT | 1017 | TTTTCTAGTCCCATGTG | 2328 | UUUUCUAGUCCCAUGUGAU |
| exon_4 | | | | ATTTAAACAAACA | | UUAAACAAACA |
| BCL11A_ | − | TTTT | 1018 | TTTCTAGTCCCATGTGA | 2329 | UUUCUAGUCCCAUGUGAUU |
| exon_4 | | | | TTTAAACAAACAA | | UAAACAAACAA |
| BCL11A_ | − | TTTT | 1019 | TTCTAGTCCCATGTGAT | 2330 | UUCUAGUCCCAUGUGAUUU |
| exon_4 | | | | TTAAACAAACAAA | | AAACAAACAAA |
| BCL11A_ | − | TTTT | 1020 | TCTAGTCCCATGTGATT | 2331 | UCUAGUCCCAUGUGAUUUA |
| exon_4 | | | | TAAACAAACAAAC | | AACAAACAAAC |
| BCL11A_ | − | TTTT | 1021 | CTAGTCCCATGTGATTT | 2332 | CUAGUCCCAUGUGAUUUAA |
| exon_4 | | | | AAACAAACAAACA | | ACAAACAAACA |
| BCL11A_ | − | TTTC | 1022 | TAGTCCCATGTGATTTA | 2333 | UAGUCCCAUGUGAUUUAAA |
| exon_4 | | | | AACAAACAAACAA | | CAAACAAACAA |
| BCL11A_ | − | ATTT | 1023 | AAACAAACAAACAAACA | 2334 | AAACAAACAAACAAACAAA |
| exon_4 | | | | AACAGAAGTAACG | | CAGAAGUAACG |
| BCL11A_ | − | TTTA | 1024 | AACAAACAAACAAACAA | 2335 | AACAAACAAACAAACAAAC |
| exon 4 | | | | ACAGAAGTAACGA | | AGAAGUAACGA |
| BCL11A_ | − | CTTG | 1025 | TCACCAGCACACCTGTT | 2336 | UCACCAGCACACCUGUUUU |
| exon 4 | | | | TTTTTTCTTTTTC | | UUUUCUUUUUC |
| BCL11A_ | − | GTTT | 1026 | TTTTTCTTTTTCTTTTT | 2337 | UUUUUCUUUUUCUUUUUCU |
| exon 4 | | | | CTTTTTTCTTTTT | | UUUUUCUUUUU |
| BCL11A_ | − | TTTC | 1027 | TTTTTTCTTTTTCCTTT | 2338 | UUUUUUCUUUUUCCUUUUU |
| exon_4 | | | | TTTTTTTTTTTCC | | UUUUUUUUUCC |
| BCL11A_ | − | TTTT | 1028 | CTTTTTTCTTTTTCCTT | 2339 | CUUUUUUCUUUUUCCUUUU |
| exon_4 | | | | TTTTTTTTTTTTC | | UUUUUUUUUUC |
| BCL11A_ | − | TTTT | 1029 | TCTTTTTTCTTTTTCCT | 2340 | UCUUUUUUCUUUUUCCUUU |
| exon_4 | | | | TTTTTTTTTTTTT | | UUUUUUUUUUU |
| BCL11A_ | − | CTTT | 1030 | TTCTTTTTTCTTTTTCC | 2341 | UUCUUUUUUCUUUUUCCUU |
| exon_4 | | | | TTTTTTTTTTTTT | | UUUUUUUUUUU |
| BCL11A_ | − | TTTC | 1031 | TTTTTCTTTTTTCTTTT | 2342 | UUUUUCUUUUUUUUUUUC |
| exon_4 | | | | TCCTTTTTTTTTT | | CUUUUUUUUUU |
| BCL11A_ | − | TTTT | 1032 | CTTTTTCTTTTTTCTTT | 2343 | CUUUUUCUUUUUUCUUUUU |
| exon_4 | | | | TTCCTTTTTTTTT | | CCUUUUUUUUU |
| BCL11A_ | − | TTTT | 1033 | TTCTTTTTCCTTTTTTT | 2344 | UUCUUUUUCCUUUUUUUUU |
| exon_4 | | | | TTTTTTTCCTTTA | | UUUUUCCUUUA |
| BCL11A_ | − | TTTT | 1034 | TCTTTTTCTTTTTTCTT | 2345 | UCUUUUUCUUUUUUUUUU |
| exon_4 | | | | TTTCCTTTTTTTT | | UCCUUUUUUUU |
| BCL11A_ | − | TTTC | 1035 | TTTTTCTTTTTCTTTTT | 2346 | UUUUUCUUUUUCUUUUUUC |
| exon_4 | | | | TCTTTTTCCTTTT | | UUUUUCCUUUU |
| BCL11A_ | − | TTTT | 1036 | CTTTTTCTTTTTCTTTT | 2347 | CUUUUUCUUUUUCUUUUUU |
| exon_4 | | | | TTCTTTTTCCTTT | | CUUUUUCCUUU |
| BCL11A_ | − | TTTT | 1037 | TCTTTTTCTTTTTCTTT | 2348 | UCUUUUUCUUUUUCUUUUU |
| exon_4 | | | | TTTCTTTTTCCTT | | UCUUUUUCCUU |
| BCL11A_ | − | TTTT | 1038 | TTCTTTTTCTTTTTCTT | 2349 | UUCUUUUUCUUUUUCUUUU |
| exon_4 | | | | TTTTCTTTTTCCT | | UUCUUUUUCCU |
| BCL11A_ | − | TTTT | 1039 | TTTCTTTTTCTTTTTCT | 2350 | UUUCUUUUUCUUUUUCUUU |
| exon_4 | | | | TTTTTCTTTTTCC | | UUUCUUUUUCC |
| BCL11A_ | − | TTTT | 1040 | TTTTCTTTTTCTTTTTC | 2351 | UUUUCUUUUUCUUUUUCUU |
| exon 4 | | | | TTTTTTCTTTTTC | | UUUUCUUUUUC |
| BCL11A_ | − | CTTT | 1041 | TTCTTTTTCTTTTTTCT | 2352 | UUCUUUUUCUUUUUUCUUU |
| exon_4 | | | | TTTTCCTTTTTTT | | UUCCUUUUUUU |
| BCL11A_ | − | TTTT | 1042 | TTTGGCAGTTGTCTGCA | 2353 | UUUGGCAGUUGUCUGCAUU |
| exon 4 | | | | TTAACCTGTTCAT | | AACCUGUUCAU |
| BCL11A_ | − | CTTT | 1043 | TCCATACACTGTGTGCT | 2354 | UCCAUACACUGUGUGCUAU |
| exon_4 | | | | ATTTGTGTTAACA | | UUGUGUUAACA |
| BCL11A_ | − | TTTC | 1044 | CATACACTGTGTGCTAT | 2355 | CAUACACUGUGUGCUAUUU |
| exon 4 | | | | TTGTGTTAACATG | | GUGUUAACAUG |
| BCL11A_ | − | TTTT | 1045 | GTCCCTTTCCTTCTATC | 2356 | GUCCCUUUCCUUCUAUCAC |
| exon_4 | | | | ACCCTACATTCCA | | CCUACAUUCCA |
| BCL11A_ | − | TTTG | 1046 | TCCCTTTCCTTCTATCA | 2357 | UCCCUUUCCUUCUAUCACC |
| exon_4 | | | | CCCTACATTCCAG | | CUACAUUCCAG |
| BCL11A_ | − | CTTT | 1047 | CCTTCTATCACCCTACA | 2358 | CCUUCUAUCACCCUACAUU |
| exon_4 | | | | TTCCAGCATCTTA | | CCAGCAUCUUA |
| BCL11A_ | + | CTTT | 1048 | ACCTGCAAAATAATACA | 2359 | ACCUGCAAAAUAAUACAAC |
| exon_4 | | | | ACACCAACATCAA | | ACCAACAUCAA |
| BCL11A_ | − | CTTC | 1049 | TATCACCCTACATTCCA | 2360 | UAUCACCCUACAUUCCAGC |
| exon_4 | | | | GCATCTTACCTTC | | AUCUUACCUUC |
| BCL11A_ | − | ATTC | 1050 | CAGCATCTTACCTTCAT | 2361 | CAGCAUCUUACCUUCAUAU |
| exon_4 | | | | ATGCAGTAAAAGA | | GCAGUAAAAGA |
| BCL11A_ | − | CTTA | 1051 | CCTTCATATGCAGTAAA | 2362 | CCUUCAUAUGCAGUAAAAG |
| exon_4 | | | | AGAAAGAAAGAAA | | AAAGAAAGAAA |
| BCL11A_ | − | CTTC | 1052 | ATATGCAGTAAAAGAAA | 2363 | AUAUGCAGUAAAAGAAAGA |
| exon_4 | | | | GAAAGAAAAAAAA | | AAGAAAAAAAA |
| BCL11A_ | − | GTTT | 1053 | TGCAGTTTTTTTCATTG | 2364 | UGCAGUUUUUUUCAUUGCC |
| exon_4 | | | | CCAAAAACTAAAT | | AAAAACUAAAU |
| BCL11A_ | − | TTTT | 1054 | GCAGTTTTTTTCATTGC | 2365 | GCAGUUUUUUUCAUUGCCA |
| exon_4 | | | | CAAAAACTAAATG | | AAAACUAAAUG |
| BCL11A_ | − | TTTG | 1055 | CAGTTTTTTTCATTGCC | 2366 | CAGUUUUUUUCAUUGCCAA |
| exon_4 | | | | AAAAACTAAATGG | | AAACUAAAUGG |
| BCL11A_ | − | GTTT | 1056 | TTTTCATTGCCAAAAAC | 2367 | UUUUCAUUGCCAAAAACUA |
| exon_4 | | | | TAAATGGTGCTTT | | AAUGGUGCUUU |
| BCL11A_ | − | TTTT | 1057 | TTTCATTGCCAAAAACT | 2368 | UUUCAUUGCCAAAAACUAA |
| exon_4 | | | | AAATGGTGCTTTA | | AUGGUGCUUUA |
| BCL11A_ | − | TTTT | 1058 | TTCATTGCCAAAAACTA | 2369 | UUCAUUGCCAAAAACUAAA |
| exon_4 | | | | AATGGTGCTTTAT | | UGGUGCUUUAU |
| BCL11A_ | − | TTTT | 1059 | TGTCCCTTTCCTTCTAT | 2370 | UGUCCCUUUCCUUCUAUCA |
| exon_4 | | | | CACCCTACATTCC | | CCCUACAUUCC |
| BCL11A_ | − | TTTT | 1060 | TCATTGCCAAAAACTAA | 2371 | UCAUUGCCAAAAACUAAAU |
| exon_4 | | | | ATGGTGCTTTATA | | GGUGCUUUAUA |
| BCL11A_ | − | TTTC | 1061 | ATTGCCAAAAACTAAAT | 2372 | AUUGCCAAAAACUAAAUGG |
| exon_4 | | | | GGTGCTTTATATT | | UGCUUUAUAUU |
| BCL11A_ | − | ATTG | 1062 | CCAAAAACTAAATGGTG | 2373 | CCAAAAACUAAAUGGUGCU |
| exon_4 | | | | CTTTATATTTAGA | | UUAUAUUUAGA |
| BCL11A_ | − | CTTT | 1063 | ATATTTAGATTGGAAAG | 2374 | AUAUUUAGAUUGGAAAGAA |
| exon_4 | | | | AATTTCATATGCA | | UUUCAUAUGCA |
| BCL11A_ | − | TTTA | 1064 | TATTTAGATTGGAAAGA | 2375 | UAUUUAGAUUGGAAAGAAU |
| exon_4 | | | | ATTTCATATGCAA | | UUCAUAUGCAA |
| BCL11A_ | − | ATTT | 1065 | AGATTGGAAAGAATTTC | 2376 | AGAUUGGAAAGAAUUUCAU |
| exon_4 | | | | ATATGCAAAGCAT | | AUGCAAAGCAU |
| BCL11A_ | − | TTTA | 1066 | GATTGGAAAGAATTTCA | 2377 | GAUUGGAAAGAAUUUCAUA |
| exon_4 | | | | TATGCAAAGCATA | | UGCAAAGCAUA |
| BCL11A_ | − | ATTG | 1067 | GAAAGAATTTCATATGC | 2378 | GAAAGAAUUUCAUAUGCAA |
| exon_4 | | | | AAAGCATATTAAA | | AGCAUAUUAAA |
| BCL11A_ | − | ATTT | 1068 | CATATGCAAAGCATATT | 2379 | CAUAUGCAAAGCAUAUUAA |
| exon_4 | | | | AAAGAGAAAGCCC | | AGAGAAAGCCC |
| BCL11A_ | − | TTTC | 1069 | ATATGCAAAGCATATTA | 2380 | AUAUGCAAAGCAUAUUAAA |
| exon_4 | | | | AAGAGAAAGCCCG | | GAGAAAGCCCG |
| BCL11A_ | − | ATTA | 1070 | AAGAGAAAGCCCGCTTT | 2381 | AAGAGAAAGCCCGCUUUAG |
| exon_4 | | | | AGTCAATACTTTT | | UCAAUACUUUU |
| BCL11A_ | − | CTTT | 1071 | AGTCAATACTTTTTTGT | 2382 | AGUCAAUACUUUUUUGUAA |
| exon_4 | | | | AAATGGCAATGCA | | AUGGCAAUGCA |
| BCL11A_ | − | TTTA | 1072 | GTCAATACTTTTTTGTA | 2383 | GUCAAUACUUUUUUGUAAA |
| exon_4 | | | | AATGGCAATGCAG | | UGGCAAUGCAG |
| BCL11A_ | − | CTTT | 1073 | TTTGTAAATGGCAATGC | 2384 | UUUGUAAAUGGCAAUGCAG |
| exon 4 | | | | AGAATATTTTGTT | | AAUAUUUUGUU |
| BCL11A_ | − | TTTT | 1074 | TTGTAAATGGCAATGCA | 2385 | UUGUAAAUGGCAAUGCAGA |
| exon_4 | | | | GAATATTTTGTTA | | AUAUUUUGUUA |
| BCL11A_ | − | TTTT | 1075 | CATTGCCAAAAACTAAA | 2386 | CAUUGCCAAAAACUAAAUG |
| exon_4 | | | | TGGTGCTTTATAT | | GUGCUUUAUAU |
| BCL11A_ | − | CTTT | 1076 | TTGTCCCTTTCCTTCTA | 2387 | UUGUCCCUUUCCUUCUAUC |
| exon_4 | | | | TCACCCTACATTC | | ACCCUACAUUC |
| BCL11A_ | − | GTTA | 1077 | TGTAGTGTGCTTTTTGT | 2388 | UGUAGUGUGCUUUUUGUCC |
| exon_4 | | | | CCCTTTCCTTCTA | | CUUUCCUUCUA |
| BCL11A_ | − | TTTG | 1078 | TTATGTAGTGTGCTTTT | 2389 | UUAUGUAGUGUGCUUUUUG |
| exon_4 | | | | TGTCCCTTTCCTT | | UCCCUUUCCUU |
| BCL11A_ | − | TTTT | 1079 | TGGTAGTGGAAAAAAAA | 2390 | UGGUAGUGGAAAAAAAAAA |
| exon_4 | | | | AAGACAGGCTGCC | | GACAGGCUGCC |
| BCL11A_ | − | TTTT | 1080 | GGTAGTGGAAAAAAAAA | 2391 | GGUAGUGGAAAAAAAAAAG |
| exon_4 | | | | AGACAGGCTGCCA | | ACAGGCUGCCA |
| BCL11A_ | − | TTTG | 1081 | GTAGTGGAAAAAAAAAA | 2392 | GUAGUGGAAAAAAAAAAGA |
| exon_4 | | | | GACAGGCTGCCAC | | CAGGCUGCCAC |
| BCL11A_ | − | ATTT | 1082 | TTTTAATTTGGCAGGAT | 2393 | UUUUAAUUUGGCAGGAUAA |
| exon_4 | | | | AATATAGTGCAAA | | UAUAGUGCAAA |
| BCL11A_ | − | TTTT | 1083 | TTTAATTTGGCAGGATA | 2394 | UUUAAUUUGGCAGGAUAAU |
| exon_4 | | | | ATATAGTGCAAAT | | AUAGUGCAAAU |
| BCL11A_ | − | TTTT | 1084 | TTAATTTGGCAGGATAA | 2395 | UUAAUUUGGCAGGAUAAUA |
| exon_4 | | | | TATAGTGCAAATT | | UAGUGCAAAUU |
| BCL11A_ | − | TTTT | 1085 | TAATTTGGCAGGATAAT | 2396 | UAAUUUGGCAGGAUAAUAU |
| exon_4 | | | | ATAGTGCAAATTA | | AGUGCAAAUUA |
| BCL11A_ | − | TTTT | 1086 | AATTTGGCAGGATAATA | 2397 | AAUUUGGCAGGAUAAUAUA |
| exon_4 | | | | TAGTGCAAATTAT | | GUGCAAAUUAU |
| BCL11A_ | − | TTTA | 1087 | ATTTGGCAGGATAATAT | 2398 | AUUUGGCAGGAUAAUAUAG |
| exon_4 | | | | AGTGCAAATTATT | | UGCAAAUUAUU |
| BCL11A_ | − | ATTT | 1088 | GGCAGGATAATATAGTG | 2399 | GGCAGGAUAAUAUAGUGCA |
| exon_4 | | | | CAAATTATTTGTA | | AAUUAUUUGUA |
| BCL11A_ | − | TTTG | 1089 | GCAGGATAATATAGTGC | 2400 | GCAGGAUAAUAUAGUGCAA |
| exon_4 | | | | AAATTATTTGTAT | | AUUAUUUGUAU |
| BCL11A_ | − | ATTA | 1090 | TTTGTATGCTTCAAAAA | 2401 | UUUGUAUGCUUCAAAAAAA |
| exon 4 | | | | AAAAAAAAAGAGA | | AAAAAAAGAGA |
| BCL11A_ | − | ATTT | 1091 | GTATGCTTCAAAAAAAA | 2402 | GUAUGCUUCAAAAAAAAAA |
| exon 4 | | | | AAAAAAGAGAGAA | | AAAAGAGAGAA |
| BCL11A_ | − | TTTG | 1092 | TATGCTTCAAAAAAAAA | 2403 | UAUGCUUCAAAAAAAAAAA |
| exon_4 | | | | AAAAAGAGAGAAA | | AAAGAGAGAAA |
| BCL11A_ | − | CTTC | 1093 | AAAAAAAAAAAAAAGAG | 2404 | AAAAAAAAAAAAAAGAGAG |
| exon_4 | | | | AGAAACAAAAAAG | | AAACAAAAAAG |
| BCL11A_ | − | ATTA | 1094 | CAGATGAGAAGCCATAT | 2405 | CAGAUGAGAAGCCAUAUAA |
| exon_4 | | | | AATGGCGGTTTGG | | UGGCGGUUUGG |
| BCL11A_ | − | GTTT | 1095 | GGGGGAGCCTGCTAGAA | 2406 | GGGGGAGCCUGCUAGAAUG |
| exon_4 | | | | TGTCACATGGATG | | UCACAUGGAUG |
| BCL11A_ | − | GTTT | 1096 | GTTATGTAGTGTGCTTT | 2407 | GUUAUGUAGUGUGCUUUUU |
| exon_4 | | | | TTGTCCCTTTCCT | | GUCCCUUUCCU |
| BCL11A_ | − | GTTG | 1097 | GTTTGTTATGTAGTGTG | 2408 | GUUUGUUAUGUAGUGUGCU |
| exon_4 | | | | CTTTTTGTCCCTT | | UUUUGUCCCUU |
| BCL11A_ | − | TTTC | 1098 | CTGCTGCCATACTGTAT | 2409 | CUGCUGCCAUACUGUAUGC |
| exon_4 | | | | GCAGTACTGCAAG | | AGUACUGCAAG |
| BCL11A_ | − | TTTT | 1099 | CCTGCTGCCATACTGTA | 2410 | CCUGCUGCCAUACUGUAUG |
| exon_4 | | | | TGCAGTACTGCAA | | CAGUACUGCAA |
| BCL11A_ | − | TTTT | 1100 | TCCTGCTGCCATACTGT | 2411 | UCCUGCUGCCAUACUGUAU |
| exon_4 | | | | ATGCAGTACTGCA | | GCAGUACUGCA |
| BCL11A_ | − | CTTT | 1101 | TTCCTGCTGCCATACTG | 2412 | UUCCUGCUGCCAUACUGUA |
| exon_4 | | | | TATGCAGTACTGC | | UGCAGUACUGC |
| BCL11A_ | − | TTTT | 1102 | TGTAAATGGCAATGCAG | 2413 | UGUAAAUGGCAAUGCAGAA |
| exon_4 | | | | AATATTTTGTTAT | | UAUUUUGUUAU |
| BCL11A_ | − | GTTC | 1103 | CTTTTTCCTGCTGCCAT | 2414 | CUUUUUCCUGCUGCCAUAC |
| exon_4 | | | | ACTGTATGCAGTA | | UGUAUGCAGUA |
| BCL11A_ | − | TTTT | 1104 | GTTCCTTTTTCCTGCTG | 2415 | GUUCCUUUUUCCUGCUGCC |
| exon_4 | | | | CCATACTGTATGC | | AUACUGUAUGC |
| BCL11A_ | − | TTTT | 1105 | TGTTCCTTTTTCCTGCT | 2416 | UGUUCCUUUUUCCUGCUGC |
| exon_4 | | | | GCCATACTGTATG | | CAUACUGUAUG |
| BCL11A_ | − | TTTT | 1106 | TTGTTCCTTTTTCCTGC | 2417 | UUGUUCCUUUUUCCUGCUG |
| exon_4 | | | | TGCCATACTGTAT | | CCAUACUGUAU |
| BCL11A_ | − | CTTT | 1107 | TTTGTTCCTTTTTCCTG | 2418 | UUUGUUCCUUUUUCCUGCU |
| exon_4 | | | | CTGCCATACTGTA | | GCCAUACUGUA |
| BCL11A_ | − | GTTG | 1108 | TACATATCCTTTTTTGT | 2419 | UACAUAUCCUUUUUUGUUC |
| exon_4 | | | | TCCTTTTTCCTGC | | CUUUUUCCUGC |
| BCL11A_ | − | TTTG | 1109 | GGGGAGCCTGCTAGAAT | 2420 | GGGGAGCCUGCUAGAAUGU |
| exon_4 | | | | GTCACATGGATGG | | CACAUGGAUGG |
| BCL11A_ | − | TTTG | 1110 | TTCCTTTTTCCTGCTGC | 2421 | UUCCUUUUUCCUGCUGCCA |
| exon 4 | | | | CATACTGTATGCA | | UACUGUAUGCA |
| BCL11A_ | − | TTTT | 1111 | GTAAATGGCAATGCAGA | 2422 | GUAAAUGGCAAUGCAGAAU |
| exon 4 | | | | ATATTTTGTTATT | | AUUUUGUUAUU |
| BCL11A_ | − | TTTG | 1112 | TAAATGGCAATGCAGAA | 2423 | UAAAUGGCAAUGCAGAAUA |
| exon_4 | | | | TATTTTGTTATTG | | UUUUGUUAUUG |
| BCL11A_ | − | ATTT | 1113 | TGTTATTGGCCTTTTCT | 2424 | UGUUAUUGGCCUUUUCUAU |
| exon_4 | | | | ATTCCTGTAATGA | | UCCUGUAAUGA |
| BCL11A_ | − | GTTT | 1114 | TTATTTTTTTTTTTATT | 2425 | UUAUUUUUUUUUUUAUUUA |
| exon_4 | | | | TAGATGACCAAAG | | GAUGACCAAAG |
| BCL11A_ | − | TTTT | 1115 | TATTTTTTTTTTTATTT | 2426 | UAUUUUUUUUUUUAUUUAG |
| exon_4 | | | | AGATGACCAAAGG | | AUGACCAAAGG |
| BCL11A_ | − | TTTT | 1116 | ATTTTTTTTTTTATTTA | 2427 | AUUUUUUUUUUUAUUUAGA |
| exon_4 | | | | GATGACCAAAGGT | | UGACCAAAGGU |
| BCL11A_ | − | TTTA | 1117 | TTTTTTTTTTTATTTAG | 2428 | UUUUUUUUUUUAUUUAGAU |
| exon_4 | | | | ATGACCAAAGGTC | | GACCAAAGGUC |
| BCL11A_ | − | ATTT | 1118 | TTTTTTTTATTTAGATG | 2429 | UUUUUUUUAUUUAGAUGAC |
| exon_4 | | | | ACCAAAGGTCATT | | CAAAGGUCAUU |
| BCL11A_ | − | TTTT | 1119 | TTTTTTTATTTAGATGA | 2430 | UUUUUUUAUUUAGAUGACC |
| exon_4 | | | | CCAAAGGTCATTA | | AAAGGUCAUUA |
| BCL11A_ | − | TTTT | 1120 | TTTTTTATTTAGATGAC | 2431 | UUUUUUAUUUAGAUGACCA |
| exon_4 | | | | CAAAGGTCATTAC | | AAGGUCAUUAC |
| BCL11A_ | − | TTTT | 1121 | TTTTTATTTAGATGACC | 2432 | UUUUUAUUUAGAUGACCAA |
| exon_4 | | | | AAAGGTCATTACA | | AGGUCAUUACA |
| BCL11A_ | − | TTTT | 1122 | TTTTATTTAGATGACCA | 2433 | UUUUAUUUAGAUGACCAAA |
| exon 4 | | | | AAGGTCATTACAA | | GGUCAUUACAA |
| BCL11A_ | − | TTTT | 1123 | TTTATTTAGATGACCAA | 2434 | UUUAUUUAGAUGACCAAAG |
| exon_4 | | | | AGGTCATTACAAC | | GUCAUUACAAC |
| BCL11A_ | − | TTTT | 1124 | TTATTTAGATGACCAAA | 2435 | UUAUUUAGAUGACCAAAGG |
| exon_4 | | | | GGTCATTACAACC | | UCAUUACAACC |
| BCL11A_ | − | TTTT | 1125 | TATTTAGATGACCAAAG | 2436 | UAUUUAGAUGACCAAAGGU |
| exon_4 | | | | GTCATTACAACCT | | CAUUACAACCU |
| BCL11A_ | − | TTTT | 1126 | ATTTAGATGACCAAAGG | 2437 | AUUUAGAUGACCAAAGGUC |
| exon_4 | | | | TCATTACAACCTG | | AUUACAACCUG |
| BCL11A_ | − | TTTA | 1127 | TTTAGATGACCAAAGGT | 2438 | UUUAGAUGACCAAAGGUCA |
| exon_4 | | | | CATTACAACCTGG | | UUACAACCUGG |
| BCL11A_ | − | ATTT | 1128 | AGATGACCAAAGGTCAT | 2439 | AGAUGACCAAAGGUCAUUA |
| exon_4 | | | | TACAACCTGGCTT | | CAACCUGGCUU |
| BCL11A_ | − | TTTA | 1129 | GATGACCAAAGGTCATT | 2440 | GAUGACCAAAGGUCAUUAC |
| exon_4 | | | | ACAACCTGGCTTT | | AACCUGGCUUU |
| BCL11A_ | − | ATTA | 1130 | CAACCTGGCTTTTTATT | 2441 | CAACCUGGCUUUUUAUUGU |
| exon 4 | | | | GTATTTGTTTCTG | | AUUUGUUUCUG |
| BCL11A_ | − | ATTG | 1131 | GAAAAACCACTGTCTGT | 2442 | GAAAAACCACUGUCUGUGU |
| exon 4 | | | | GTTTTTTTGGCAG | | UUUUUUGGCAG |
| BCL11A_ | − | GTTC | 1132 | TATTGGAAAAACCACTG | 2443 | UAUUGGAAAAACCACUGUC |
| exon_4 | | | | TCTGTGTTTTTTT | | UGUGUUUUUUU |
| BCL11A_ | − | GTTA | 1133 | AGTTCTATTGGAAAAAC | 2444 | AGUUCUAUUGGAAAAACCA |
| exon_4 | | | | CACTGTCTGTGTT | | CUGUCUGUGUU |
| BCL11A_ | − | TTTG | 1134 | TTAAGTTCTATTGGAAA | 2445 | UUAAGUUCUAUUGGAAAAA |
| exon_4 | | | | AACCACTGTCTGT | | CCACUGUCUGU |
| BCL11A_ | − | CTTT | 1135 | GTTAAGTTCTATTGGAA | 2446 | GUUAAGUUCUAUUGGAAAA |
| exon_4 | | | | AAACCACTGTCTG | | ACCACUGUCUG |
| BCL11A_ | − | TTTC | 1136 | TGGTCTTTGTTAAGTTC | 2447 | UGGUCUUUGUUAAGUUCUA |
| exon_4 | | | | TATTGGAAAAACC | | UUGGAAAAACC |
| BCL11A_ | − | TTTG | 1137 | TTTTTATTTTTTTTTTT | 2448 | UUUUUAUUUUUUUUUUUAU |
| exon_4 | | | | ATTTAGATGACCA | | UUAGAUGACCA |
| BCL11A_ | − | GTTT | 1138 | CTGGTCTTTGTTAAGTT | 2449 | CUGGUCUUUGUUAAGUUCU |
| exon 4 | | | | CTATTGGAAAAAC | | AUUGGAAAAAC |
| BCL11A_ | − | ATTT | 1139 | GTTTCTGGTCTTTGTTA | 2450 | GUUUCUGGUCUUUGUUAAG |
| exon_4 | | | | AGTTCTATTGGAA | | UUCUAUUGGAA |
| BCL11A_ | − | ATTG | 1140 | TATTTGTTTCTGGTCTT | 2451 | UAUUUGUUUCUGGUCUUUG |
| exon 4 | | | | TGTTAAGTTCTAT | | UUAAGUUCUAU |
| BCL11A_ | − | TTTA | 1141 | TTGTATTTGTTTCTGGT | 2452 | UUGUAUUUGUUUCUGGUCU |
| exon 4 | | | | CTTTGTTAAGTTC | | UUGUUAAGUUC |
| BCL11A_ | − | TTTT | 1142 | ATTGTATTTGTTTCTGG | 2453 | AUUGUAUUUGUUUCUGGUC |
| exon 4 | | | | TCTTTGTTAAGTT | | UUUGUUAAGUU |
| BCL11A_ | − | TTTT | 1143 | TATTGTATTTGTTTCTG | 2454 | UAUUGUAUUUGUUUCUGGU |
| exon_4 | | | | GTCTTTGTTAAGT | | CUUUGUUAAGU |
| BCL11A_ | − | CTTT | 1144 | TTATTGTATTTGTTTCT | 2455 | UUAUUGUAUUUGUUUCUGG |
| exon_4 | | | | GGTCTTTGTTAAG | | UCUUUGUUAAG |
| BCL11A_ | − | TTTG | 1145 | TTTCTGGTCTTTGTTAA | 2456 | UUUCUGGUCUUUGUUAAGU |
| exon_4 | | | | GTTCTATTGGAAA | | UCUAUUGGAAA |
| BCL11A_ | − | TTTT | 1146 | TTGGTAGTGGAAAAAAA | 2457 | UUGGUAGUGGAAAAAAAAA |
| exon_4 | | | | AAAGACAGGCTGC | | AGACAGGCUGC |
| BCL11A_ | − | CTTT | 1147 | GTTTTTATTTTTTTTTT | 2458 | GUUUUUAUUUUUUUUUUUA |
| exon_4 | | | | TATTTAGATGACC | | UUUAGAUGACC |
| BCL11A_ | − | TTTT | 1148 | CTTTGTTTTTATTTTTT | 2459 | CUUUGUUUUUAUUUUUUUU |
| exon 4 | | | | TTTTTATTTAGAT | | UUUAUUUAGAU |
| BCL11A_ | − | TTTT | 1149 | GTTATTGGCCTTTTCTA | 2460 | GUUAUUGGCCUUUUCUAUU |
| exon 4 | | | | TTCCTGTAATGAA | | CCUGUAAUGAA |
| BCL11A_ | − | TTTG | 1150 | TTATTGGCCTTTTCTAT | 2461 | UUAUUGGCCUUUUCUAUUC |
| exon 4 | | | | TCCTGTAATGAAA | | CUGUAAUGAAA |
| BCL11A_ | − | GTTA | 1151 | TTGGCCTTTTCTATTCC | 2462 | UUGGCCUUUUCUAUUCCUG |
| exon_4 | | | | TGTAATGAAAGCT | | UAAUGAAAGCU |
| BCL11A_ | − | ATTG | 1152 | GCCTTTTCTATTCCTGT | 2463 | GCCUUUUCUAUUCCUGUAA |
| exon 4 | | | | AATGAAAGCTGTT | | UGAAAGCUGUU |
| BCL11A_ | − | CTTT | 1153 | TCTATTCCTGTAATGAA | 2464 | UCUAUUCCUGUAAUGAAAG |
| exon 4 | | | | AGCTGTTTGTCGT | | CUGUUUGUCGU |
| BCL11A_ | − | TTTT | 1154 | CTATTCCTGTAATGAAA | 2465 | CUAUUCCUGUAAUGAAAGC |
| exon_4 | | | | GCTGTTTGTCGTA | | UGUUUGUCGUA |
| BCL11A_ | − | TTTC | 1155 | TATTCCTGTAATGAAAG | 2466 | UAUUCCUGUAAUGAAAGCU |
| exon_4 | | | | CTGTTTGTCGTAA | | GUUUGUCGUAA |
| BCL11A_ | − | ATTC | 1156 | CTGTAATGAAAGCTGTT | 2467 | CUGUAAUGAAAGCUGUUUG |
| exon 4 | | | | TGTCGTAACTTGA | | UCGUAACUUGA |
| BCL11A_ | − | GTTT | 1157 | GTCGTAACTTGAAATTT | 2468 | GUCGUAACUUGAAAUUUUA |
| exon_4 | | | | TATCTTTTACTAT | | UCUUUUACUAU |
| BCL11A_ | − | TTTG | 1158 | TCGTAACTTGAAATTTT | 2469 | UCGUAACUUGAAAUUUUAU |
| exon_4 | | | | ATCTTTTACTATG | | CUUUUACUAUG |
| BCL11A_ | − | CTTG | 1159 | AAATTTTATCTTTTACT | 2470 | AAAUUUUAUCUUUUACUAU |
| exon_4 | | | | ATGGGAGTCACTA | | GGGAGUCACUA |
| BCL11A_ | − | ATTT | 1160 | TATCTTTTACTATGGGA | 2471 | UAUCUUUUACUAUGGGAGU |
| exon 4 | | | | GTCACTATTTATT | | CACUAUUUAUU |
| BCL11A_ | − | TTTT | 1161 | ATCTTTTACTATGGGAG | 2472 | AUCUUUUACUAUGGGAGUC |
| exon_4 | | | | TCACTATTTATTA | | ACUAUUUAUUA |
| BCL11A_ | − | TTTA | 1162 | TCTTTTACTATGGGAGT | 2473 | UCUUUUACUAUGGGAGUCA |
| exon_4 | | | | CACTATTTATTAT | | CUAUUUAUUAU |
| BCL11A_ | − | CTTT | 1163 | TACTATGGGAGTCACTA | 2474 | UACUAUGGGAGUCACUAUU |
| exon 4 | | | | TTTATTATTGCTT | | UAUUAUUGCUU |
| BCL11A_ | − | TTTT | 1164 | ACTATGGGAGTCACTAT | 2475 | ACUAUGGGAGUCACUAUUU |
| exon 4 | | | | TTATTATTGCTTA | | AUUAUUGCUUA |
| BCL11A_ | − | TTTA | 1165 | CTATGGGAGTCACTATT | 2476 | CUAUGGGAGUCACUAUUUA |
| exon_4 | | | | TATTATTGCTTAT | | UUAUUGCUUAU |
| BCL11A_ | − | TTTT | 1166 | TCTTTGTTTTTATTTTT | 2477 | UCUUUGUUUUUAUUUUUUU |
| exon 4 | | | | TTTTTTATTTAGA | | UUUUAUUUAGA |
| BCL11A_ | − | ATTT | 1167 | TTCTTTGTTTTTATTTT | 2478 | UUCUUUGUUUUUAUUUUUU |
| exon_4 | | | | TTTTTTTATTTAG | | UUUUUAUUUAG |
| BCL11A_ | − | TTTA | 1168 | TTTTTCTTTGTTTTTAT | 2479 | UUUUUCUUUGUUUUUAUUU |
| exon_4 | | | | TTTTTTTTTTATT | | UUUUUUUUAUU |
| BCL11A_ | − | TTTT | 1169 | ATTTTTCTTTGTTTTTA | 2480 | AUUUUUCUUUGUUUUUAUU |
| exon_4 | | | | TTTTTTTTTTTAT | | UUUUUUUUUAU |
| BCL11A_ | − | CTTT | 1170 | TATTTTTCTTTGTTTTT | 2481 | UAUUUUUCUUUGUUUUUAU |
| exon_4 | | | | ATTTTTTTTTTTA | | UUUUUUUUUUA |
| BCL11A_ | − | TTTG | 1171 | ATCTTTTATTTTTCTTT | 2482 | AUCUUUUAUUUUUCUUUGU |
| exon 4 | | | | GTTTTTATTTTTT | | UUUUAUUUUUU |
| BCL11A_ | − | TTTC | 1172 | TTTGTTTTTATTTTTTT | 2483 | UUUGUUUUUAUUUUUUUUU |
| exon_4 | | | | TTTTATTTAGATG | | UUAUUUAGAUG |
| BCL11A_ | − | ATTT | 1173 | GATCTTTTATTTTTCTT | 2484 | GAUCUUUUAUUUUUCUUUG |
| exon_4 | | | | TGTTTTTATTTTT | | UUUUUAUUUUU |
| BCL11A_ | − | GTTC | 1174 | AAAACAGAGGCACTTAA | 2485 | AAAACAGAGGCACUUAAUU |
| exon 4 | | | | TTTGATCTTTTAT | | UGAUCUUUUAU |
| BCL11A_ | − | CTTA | 1175 | TGTGCCCTGTTCAAAAC | 2486 | UGUGCCCUGUUCAAAACAG |
| exon_4 | | | | AGAGGCACTTAAT | | AGGCACUUAAU |
| BCL11A_ | − | ATTG | 1176 | CTTATGTGCCCTGTTCA | 2487 | CUUAUGUGCCCUGUUCAAA |
| exon_4 | | | | AAACAGAGGCACT | | ACAGAGGCACU |
| BCL11A_ | − | ATTA | 1177 | TTGCTTATGTGCCCTGT | 2488 | UUGCUUAUGUGCCCUGUUC |
| exon_4 | | | | TCAAAACAGAGGC | | AAAACAGAGGC |
| BCL11A_ | − | TTTA | 1178 | TTATTGCTTATGTGCCC | 2489 | UUAUUGCUUAUGUGCCCUG |
| exon 4 | | | | TGTTCAAAACAGA | | UUCAAAACAGA |
| BCL11A_ | − | ATTT | 1179 | ATTATTGCTTATGTGCC | 2490 | AUUAUUGCUUAUGUGCCCU |
| exon 4 | | | | CTGTTCAAAACAG | | GUUCAAAACAG |
| BCL11A_ | − | CTTA | 1180 | ATTTGATCTTTTATTTT | 2491 | AUUUGAUCUUUUAUUUUUC |
| exon 4 | | | | TCTTTGTTTTTAT | | UUUGUUUUUAU |
| BCL11A_ | − | CTTT | 1181 | TTTGGTAGTGGAAAAAA | 2492 | UUUGGUAGUGGAAAAAAAA |
| exon_4 | | | | AAAAGACAGGCTG | | AAGACAGGCUG |
| BCL11A_ | − | CTTA | 1182 | AAAGGTATCAATGTACC | 2493 | AAAGGUAUCAAUGUACCUU |
| exon_4 | | | | TTTTTTGGTAGTG | | UUUUGGUAGUG |
| BCL11A_ | − | GTTC | 1183 | TCTTAAAAGGTATCAAT | 2494 | UCUUAAAAGGUAUCAAUGU |
| exon_4 | | | | GTACCTTTTTTGG | | ACCUUUUUUGG |
| BCL11A_ | − | TTTC | 1184 | TCTAATCAGAGATACAG | 2495 | UCUAAUCAGAGAUACAGAG |
| exon_4 | | | | AGGTTGAGTATAA | | GUUGAGUAUAA |
| BCL11A_ | − | GTTG | 1185 | AGTATAAAATAAACCTG | 2496 | AGUAUAAAAUAAACCUGCU |
| exon_4 | | | | CTCAGATAGGACA | | CAGAUAGGACA |
| BCL11A_ | − | ATTA | 1186 | AGTGCACTGTACAATTT | 2497 | AGUGCACUGUACAAUUUUC |
| exon 4 | | | | TCCCAGTTTACAG | | CCAGUUUACAG |
| BCL11A_ | − | ATTT | 1187 | TCCCAGTTTACAGGTCT | 2498 | UCCCAGUUUACAGGUCUAU |
| exon 4 | | | | ATACTTAAGGGAA | | ACUUAAGGGAA |
| BCL11A_ | − | TTTT | 1188 | CCCAGTTTACAGGTCTA | 2499 | CCCAGUUUACAGGUCUAUA |
| exon_4 | | | | TACTTAAGGGAAA | | CUUAAGGGAAA |
| BCL11A_ | − | TTTC | 1189 | CCAGTTTACAGGTCTAT | 2500 | CCAGUUUACAGGUCUAUAC |
| exon 4 | | | | ACTTAAGGGAAAA | | UUAAGGGAAAA |
| BCL11A_ | − | GTTT | 1190 | ACAGGTCTATACTTAAG | 2501 | ACAGGUCUAUACUUAAGGG |
| exon_4 | | | | GGAAAAGTTGCAA | | AAAAGUUGCAA |
| BCL11A_ | − | TTTA | 1191 | CAGGTCTATACTTAAGG | 2502 | CAGGUCUAUACUUAAGGGA |
| exon_4 | | | | GAAAAGTTGCAAG | | AAAGUUGCAAG |
| BCL11A_ | − | CTTA | 1192 | AGGGAAAAGTTGCAAGA | 2503 | AGGGAAAAGUUGCAAGAAU |
| exon_4 | | | | ATGCTGAAAAAAA | | GCUGAAAAAAA |
| BCL11A_ | − | GTTG | 1193 | CAAGAATGCTGAAAAAA | 2504 | CAAGAAUGCUGAAAAAAAA |
| exon 4 | | | | AATTGAACACAAT | | UUGAACACAAU |
| BCL11A_ | − | ATTG | 1194 | AACACAATCTCATTGAG | 2505 | AACACAAUCUCAUUGAGGA |
| exon 4 | | | | GAGCATTTTTTAA | | GCAUUUUUUAA |
| BCL11A_ | − | ATTG | 1195 | AGGAGCATTTTTTAAAA | 2506 | AGGAGCAUUUUUUAAAAAC |
| exon_4 | | | | ACTAAAAAAAAAA | | UAAAAAAAAAA |
| BCL11A_ | − | ATTT | 1196 | TTTAAAAACTAAAAAAA | 2507 | UUUAAAAACUAAAAAAAAA |
| exon 4 | | | | AAAAAACTTTGCC | | AAAACUUUGCC |
| BCL11A_ | − | TTTT | 1197 | TTAAAAACTAAAAAAAA | 2508 | UUAAAAACUAAAAAAAAAA |
| exon_4 | | | | AAAAACTTTGCCA | | AAACUUUGCCA |
| BCL11A_ | − | TTTT | 1198 | TAAAAACTAAAAAAAAA | 2509 | UAAAAACUAAAAAAAAAAA |
| exon_4 | | | | AAAACTTTGCCAG | | AACUUUGCCAG |
| BCL11A_ | − | TTTT | 1199 | AAAAACTAAAAAAAAAA | 2510 | AAAAACUAAAAAAAAAAAA |
| exon_4 | | | | AAACTTTGCCAGC | | ACUUUGCCAGC |
| BCL11A_ | − | TTTA | 1200 | AAAACTAAAAAAAAAAA | 2511 | AAAACUAAAAAAAAAAAAA |
| exon_4 | | | | AACTTTGCCAGCC | | CUUUGCCAGCC |
| BCL11A_ | − | TTTC | 1201 | GCTTCTACAGTGCAAGG | 2512 | GCUUCUACAGUGCAAGGAU |
| exon_4 | | | | ATTTTTTTGTACA | | UUUUUUGUACA |
| BCL11A_ | − | CTTT | 1202 | CGCTTCTACAGTGCAAG | 2513 | CGCUUCUACAGUGCAAGGA |
| exon_4 | | | | GATTTTTTTGTAC | | UUUUUUUGUAC |
| BCL11A_ | − | ATTG | 1203 | CTTTCGCTTCTACAGTG | 2514 | CUUUCGCUUCUACAGUGCA |
| exon_4 | | | | CAAGGATTTTTTT | | AGGAUUUUUUU |
| BCL11A_ | − | CTTA | 1204 | ACATAGAAATGAATGAT | 2515 | ACAUAGAAAUGAAUGAUUG |
| exon_4 | | | | TGCTTTCGCTTCT | | CUUUCGCUUCU |
| BCL11A_ | − | ATTG | 1205 | CAAGCGCTGTGAATGGA | 2516 | CAAGCGCUGUGAAUGGAAA |
| exon_4 | | | | AACAGAATACACT | | CAGAAUACACU |
| BCL11A_ | − | CTTG | 1206 | GACGCAACATTGCAAGC | 2517 | GACGCAACAUUGCAAGCGC |
| exon_4 | | | | GCTGTGAATGGAA | | UGUGAAUGGAA |
| BCL11A_ | − | TTTT | 1207 | CTCTAATCAGAGATACA | 2518 | CUCUAAUCAGAGAUACAGA |
| exon 4 | | | | GAGGTTGAGTATA | | GGUUGAGUAUA |
| BCL11A_ | − | CTTA | 1208 | CTTGGACGCAACATTGC | 2519 | CUUGGACGCAACAUUGCAA |
| exon 4 | | | | AAGCGCTGTGAAT | | GCGCUGUGAAU |
| BCL11A_ | − | ATTG | 1209 | AGCTTACTTACTTGGAC | 2520 | AGCUUACUUACUUGGACGC |
| exon 4 | | | | GCAACATTGCAAG | | AACAUUGCAAG |
| BCL11A_ | − | CTTG | 1210 | ACTATTGAGCTTACTTA | 2521 | ACUAUUGAGCUUACUUACU |
| exon_4 | | | | CTTGGACGCAACA | | UGGACGCAACA |
| BCL11A_ | − | TTTA | 1211 | CTTGACTATTGAGCTTA | 2522 | CUUGACUAUUGAGCUUACU |
| exon_4 | | | | CTTACTTGGACGC | | UACUUGGACGC |
| BCL11A_ | − | ATTT | 1212 | ACTTGACTATTGAGCTT | 2523 | ACUUGACUAUUGAGCUUAC |
| exon_4 | | | | ACTTACTTGGACG | | UUACUUGGACG |
| BCL11A_ | − | TTTG | 1213 | CCAGCCATTTACTTGAC | 2524 | CCAGCCAUUUACUUGACUA |
| exon_4 | | | | TATTGAGCTTACT | | UUGAGCUUACU |
| BCL11A_ | − | CTTT | 1214 | GCCAGCCATTTACTTGA | 2525 | GCCAGCCAUUUACUUGACU |
| exon_4 | | | | CTATTGAGCTTAC | | AUUGAGCUUAC |
| BCL11A_ | − | CTTA | 1215 | CTTACTTGGACGCAACA | 2526 | CUUACUUGGACGCAACAUU |
| exon_4 | | | | TTGCAAGCGCTGT | | GCAAGCGCUGU |
| BCL11A_ | − | CTTC | 1216 | TACAGTGCAAGGATTTT | 2527 | UACAGUGCAAGGAUUUUUU |
| exon_4 | | | | TTTGTACAAAACT | | UGUACAAAACU |
| BCL11A_ | − | CTTT | 1217 | TCTCTAATCAGAGATAC | 2528 | UCUCUAAUCAGAGAUACAG |
| exon_4 | | | | AGAGGTTGAGTAT | | AGGUUGAGUAU |
| BCL11A_ | − | GTTC | 1218 | AAATAGCACTTGACTCT | 2529 | AAAUAGCACUUGACUCUGC |
| exon 4 | | | | GCCTGTGATATCT | | CUGUGAUAUCU |
| BCL11A_ | − | ATTT | 1219 | GTGTTAACATGGAAGAG | 2530 | GUGUUAACAUGGAAGAGGA |
| exon_4 | | | | GATTCATTGTTTT | | UUCAUUGUUUU |
| BCL11A_ | − | TTTG | 1220 | TGTTAACATGGAAGAGG | 2531 | UGUUAACAUGGAAGAGGAU |
| exon_4 | | | | ATTCATTGTTTTT | | UCAUUGUUUUU |
| BCL11A_ | − | GTTA | 1221 | ACATGGAAGAGGATTCA | 2532 | ACAUGGAAGAGGAUUCAUU |
| exon_4 | | | | TTGTTTTTATTTT | | GUUUUUAUUUU |
| BCL11A_ | − | ATTC | 1222 | ATTGTTTTTATTTTTAT | 2533 | AUUGUUUUUAUUUUUAUUU |
| exon_4 | | | | TTTTTTAATTTTT | | UUUUAAUUUUU |
| BCL11A_ | − | ATTG | 1223 | TTTTTATTTTTATTTTT | 2534 | UUUUUAUUUUUAUUUUUUU |
| exon_4 | | | | TTAATTTTTTCTT | | AAUUUUUUCUU |
| BCL11A_ | − | GTTT | 1224 | TTATTTTTATTTTTTTA | 2535 | UUAUUUUUAUUUUUUUAAU |
| exon_4 | | | | ATTTTTTCTTTTT | | UUUUUUUUUU |
| BCL11A_ | − | TTTT | 1225 | TATTTTTATTTTTTTAA | 2536 | UAUUUUUAUUUUUUUAAUU |
| exon 4 | | | | TTTTTTCTTTTTT | | UUUUCUUUUUU |
| BCL11A_ | − | TTTT | 1226 | ATTTTTATTTTTTTAAT | 2537 | AUUUUUAUUUUUUUAAUUU |
| exon 4 | | | | TTTTTCTTTTTTA | | UUUCUUUUUUA |
| BCL11A_ | − | TTTA | 1227 | TTTTTATTTTTTTAATT | 2538 | UUUUUAUUUUUUUAAUUUU |
| exon_4 | | | | TTTTCTTTTTTAT | | UUCUUUUUUAU |
| BCL11A_ | − | ATTT | 1228 | TTATTTTTTTAATTTTT | 2539 | UUAUUUUUUUAAUUUUUUC |
| exon 4 | | | | TCTTTTTTATTAA | | UUUUUUAUUAA |
| BCL11A_ | − | TTTT | 1229 | TATTTTTTTAATTTTTT | 2540 | UAUUUUUUUAAUUUUUUCU |
| exon 4 | | | | CTTTTTTATTAAG | | UUUUUAUUAAG |
| BCL11A_ | − | TTTT | 1230 | ATTTTTTTAATTTTTTC | 2541 | AUUUUUUUAAUUUUUUCUU |
| exon 4 | | | | TTTTTTATTAAGC | | UUUUAUUAAGC |
| BCL11A_ | − | TTTA | 1231 | TTTTTTTAATTTTTTCT | 2542 | UUUUUUUAAUUUUUUCUUU |
| exon_4 | | | | TTTTTATTAAGCT | | UUUAUUAAGCU |
| BCL11A_ | − | ATTT | 1232 | TTTTAATTTTTTCTTTT | 2543 | UUUUAAUUUUUUCUUUUUU |
| exon 4 | | | | TTATTAAGCTAGC | | AUUAAGCUAGC |
| BCL11A_ | − | TTTT | 1233 | TTTAATTTTTTCTTTTT | 2544 | UUUAAUUUUUUCUUUUUUA |
| exon 4 | | | | TATTAAGCTAGCA | | UUAAGCUAGCA |
| BCL11A_ | − | TTTT | 1234 | TTAATTTTTTCTTTTTT | 2545 | UUAAUUUUUUCUUUUUUAU |
| exon_4 | | | | ATTAAGCTAGCAT | | UAAGCUAGCAU |
| BCL11A_ | − | TTTT | 1235 | TAATTTTTTCTTTTTTA | 2546 | UAAUUUUUUCUUUUUUAUU |
| exon_4 | | | | TTAAGCTAGCATC | | AAGCUAGCAUC |
| BCL11A_ | − | GTTG | 1236 | GTGTTCAAATAGCACTT | 2547 | GUGUUCAAAUAGCACUUGA |
| exon 4 | | | | GACTCTGCCTGTG | | CUCUGCCUGUG |
| BCL11A_ | − | ATTA | 1237 | AGCTAGCATCTGCCCCA | 2548 | AGCUAGCAUCUGCCCCAGU |
| exon 4 | | | | GTTGGTGTTCAAA | | UGGUGUUCAAA |
| BCL11A_ | − | TTTA | 1238 | TTAAGCTAGCATCTGCC | 2549 | UUAAGCUAGCAUCUGCCCC |
| exon 4 | | | | CCAGTTGGTGTTC | | AGUUGGUGUUC |
| BCL11A_ | − | TTTT | 1239 | ATTAAGCTAGCATCTGC | 2550 | AUUAAGCUAGCAUCUGCCC |
| exon 4 | | | | CCCAGTTGGTGTT | | CAGUUGGUGUU |
| BCL11A_ | − | TTTT | 1240 | TATTAAGCTAGCATCTG | 2551 | UAUUAAGCUAGCAUCUGCC |
| exon_4 | | | | CCCCAGTTGGTGT | | CCAGUUGGUGU |
| BCL11A_ | − | TTTT | 1241 | TTATTAAGCTAGCATCT | 2552 | UUAUUAAGCUAGCAUCUGC |
| exon_4 | | | | GCCCCAGTTGGTG | | CCCAGUUGGUG |
| BCL11A_ | − | CTTG | 1242 | ACTCTGCCTGTGATATC | 2553 | ACUCUGCCUGUGAUAUCUG |
| exon_4 | | | | TGTATCTTTTCTC | | UAUCUUUUCUC |
| BCL11A_ | − | CTTT | 1243 | TTTATTAAGCTAGCATC | 2554 | UUUAUUAAGCUAGCAUCUG |
| exon_4 | | | | TGCCCCAGTTGGT | | CCCCAGUUGGU |
| BCL11A_ | − | TTTT | 1244 | CTTTTTTATTAAGCTAG | 2555 | CUUUUUUAUUAAGCUAGCA |
| exon_4 | | | | CATCTGCCCCAGT | | UCUGCCCCAGU |
| BCL11A_ | − | TTTT | 1245 | TCTTTTTTATTAAGCTA | 2556 | UCUUUUUUAUUAAGCUAGC |
| exon_4 | | | | GCATCTGCCCCAG | | AUCUGCCCCAG |
| BCL11A_ | − | TTTT | 1246 | TTCTTTTTTATTAAGCT | 2557 | UUCUUUUUUAUUAAGCUAG |
| exon_4 | | | | AGCATCTGCCCCA | | CAUCUGCCCCA |
| BCL11A_ | − | ATTT | 1247 | TTTCTTTTTTATTAAGC | 2558 | UUUUUUUUUAUUAAGCUA |
| exon 4 | | | | TAGCATCTGCCCC | | GCAUCUGCCCC |
| BCL11A_ | − | TTTA | 1248 | ATTTTTTCTTTTTTATT | 2559 | AUUUUUUCUUUUUUAUUAA |
| exon_4 | | | | AAGCTAGCATCTG | | GCUAGCAUCUG |
| BCL11A_ | − | TTTT | 1249 | AATTTTTTCTTTTTTAT | 2560 | AAUUUUUUCUUUUUUAUUA |
| exon 4 | | | | TAAGCTAGCATCT | | AGCUAGCAUCU |
| BCL11A_ | − | TTTC | 1250 | TTTTTTATTAAGCTAGC | 2561 | UUUUUUAUUAAGCUAGCAU |
| exon 4 | | | | ATCTGCCCCAGTT | | CUGCCCCAGUU |
| BCL11A_ | − | TTTT | 1251 | CCATACACTGTGTGCTA | 2562 | CCAUACACUGUGUGCUAUU |
| exon 4 | | | | TTTGTGTTAACAT | | UGUGUUAACAU |
| BCL11A_ | − | ATTT | 1252 | TTTTGTACAAAACTTTT | 2563 | UUUUGUACAAAACUUUUUU |
| exon_4 | | | | TTAAATATAAATG | | AAAUAUAAAUG |
| BCL11A_ | − | TTTT | 1253 | TTGTACAAAACTTTTTT | 2564 | UUGUACAAAACUUUUUUAA |
| exon 4 | | | | AAATATAAATGTT | | AUAUAAAUGUU |
| BCL11A_ | − | ATTG | 1254 | GGGAAAGGTTTAAGATT | 2565 | GGGAAAGGUUUAAGAUUAU |
| exon 4 | | | | ATATAGTACTTAA | | AUAGUACUUAA |
| BCL11A_ | − | GTTT | 1255 | AAGATTATATAGTACTT | 2566 | AAGAUUAUAUAGUACUUAA |
| exon 4 | | | | AAATATAGGAAAA | | AUAUAGGAAAA |
| BCL11A_ | − | TTTA | 1256 | AGATTATATAGTACTTA | 2567 | AGAUUAUAUAGUACUUAAA |
| exon 4 | | | | AATATAGGAAAAT | | UAUAGGAAAAU |
| BCL11A_ | − | ATTA | 1257 | TATAGTACTTAAATATA | 2568 | UAUAGUACUUAAAUAUAGG |
| exon 4 | | | | GGAAAATGCACAC | | AAAAUGCACAC |
| BCL11A_ | − | CTTA | 1258 | AATATAGGAAAATGCAC | 2569 | AAUAUAGGAAAAUGCACAC |
| exon 4 | | | | ACTCATGTTGATT | | UCAUGUUGAUU |
| BCL11A_ | − | GTTG | 1259 | ATTCCTATGCTAAAATA | 2570 | AUUCCUAUGCUAAAAUACA |
| exon_4 | | | | CATTTATGGTCTT | | UUUAUGGUCUU |
| BCL11A_ | − | ATTC | 1260 | CTATGCTAAAATACATT | 2571 | CUAUGCUAAAAUACAUUUA |
| exon_4 | | | | TATGGTCTTTTTT | | UGGUCUUUUUU |
| BCL11A_ | − | ATTT | 1261 | ATGGTCTTTTTTCTGTA | 2572 | AUGGUCUUUUUUCUGUAUU |
| exon_4 | | | | TTTCTAGAATGGT | | UCUAGAAUGGU |
| BCL11A_ | − | TTTA | 1262 | TGGTCTTTTTTCTGTAT | 2573 | UGGUCUUUUUUCUGUAUUU |
| exon_4 | | | | TTCTAGAATGGTA | | CUAGAAUGGUA |
| BCL11A_ | − | CTTT | 1263 | TTTCTGTATTTCTAGAA | 2574 | UUUCUGUAUUUCUAGAAUG |
| exon_4 | | | | TGGTATTTGAATT | | GUAUUUGAAUU |
| BCL11A_ | − | TTTT | 1264 | TTCTGTATTTCTAGAAT | 2575 | UUCUGUAUUUCUAGAAUGG |
| exon_4 | | | | GGTATTTGAATTA | | UAUUUGAAUUA |
| BCL11A_ | − | TTTT | 1265 | TCTGTATTTCTAGAATG | 2576 | UCUGUAUUUCUAGAAUGGU |
| exon_4 | | | | GTATTTGAATTAA | | AUUUGAAUUAA |
| BCL11A_ | − | TTTT | 1266 | CTGTATTTCTAGAATGG | 2577 | CUGUAUUUCUAGAAUGGUA |
| exon_4 | | | | TATTTGAATTAAA | | UUUGAAUUAAA |
| BCL11A_ | − | TTTC | 1267 | TGTATTTCTAGAATGGT | 2578 | UGUAUUUCUAGAAUGGUAU |
| exon_4 | | | | ATTTGAATTAAAT | | UUGAAUUAAAU |
| BCL11A_ | − | ATTT | 1268 | CTAGAATGGTATTTGAA | 2579 | CUAGAAUGGUAUUUGAAUU |
| exon_4 | | | | TTAAATGTTCATC | | AAAUGUUCAUC |
| BCL11A_ | − | TTTC | 1269 | TAGAATGGTATTTGAAT | 2580 | UAGAAUGGUAUUUGAAUUA |
| exon_4 | | | | TAAATGTTCATCT | | AAUGUUCAUCU |
| BCL11A_ | − | ATTT | 1270 | GAATTAAATGTTCATCT | 2581 | GAAUUAAAUGUUCAUCUAG |
| exon_4 | | | | AGTGTTAGGCACT | | UGUUAGGCACU |
| BCL11A_ | − | CTTG | 1271 | TTCTCTTAAAAGGTATC | 2582 | UUCUCUUAAAAGGUAUCAA |
| exon_4 | | | | AATGTACCTTTTT | | UGUACCUUUUU |
| BCL11A_ | − | GTTG | 1272 | CTTGTTCTCTTAAAAGG | 2583 | CUUGUUCUCUUAAAAGGUA |
| exon_4 | | | | TATCAATGTACCT | | UCAAUGUACCU |
| BCL11A_ | − | TTTA | 1273 | ACTGTTGCTTGTTCTCT | 2584 | ACUGUUGCUUGUUCUCUUA |
| exon_4 | | | | TAAAAGGTATCAA | | AAAGGUAUCAA |
| BCL11A_ | − | TTTT | 1274 | AACTGTTGCTTGTTCTC | 2585 | AACUGUUGCUUGUUCUCUU |
| exon 4 | | | | TTAAAAGGTATCA | | AAAAGGUAUCA |
| BCL11A_ | − | TTTT | 1275 | TAACTGTTGCTTGTTCT | 2586 | UAACUGUUGCUUGUUCUCU |
| exon 4 | | | | CTTAAAAGGTATC | | UAAAAGGUAUC |
| BCL11A_ | − | ATTT | 1276 | TTAACTGTTGCTTGTTC | 2587 | UUAACUGUUGCUUGUUCUC |
| exon 4 | | | | TCTTAAAAGGTAT | | UUAAAAGGUAU |
| BCL11A_ | − | GTTG | 1277 | TAAAAAAAAAAAACATA | 2588 | UAAAAAAAAAAAACAUACA |
| exon_4 | | | | CATTGGGGAAAGG | | UUGGGGAAAGG |
| BCL11A_ | − | CTTG | 1278 | TATTTTTAACTGTTGCT | 2589 | UAUUUUUAACUGUUGCUUG |
| exon 4 | | | | TGTTCTCTTAAAA | | UUCUCUUAAAA |
| BCL11A_ | − | TTTA | 1279 | TATTGAAGCTTGTATTT | 2590 | UAUUGAAGCUUGUAUUUUU |
| exon_4 | | | | TTAACTGTTGCTT | | AACUGUUGCUU |
| BCL11A_ | − | ATTT | 1280 | ATATTGAAGCTTGTATT | 2591 | AUAUUGAAGCUUGUAUUUU |
| exon_4 | | | | TTTAACTGTTGCT | | UAACUGUUGCU |
| BCL11A_ | − | GTTA | 1281 | GGCACTATAGTATTTAT | 2592 | GGCACUAUAGUAUUUAUAU |
| exon_4 | | | | ATTGAAGCTTGTA | | UGAAGCUUGUA |
| BCL11A_ | − | GTTC | 1282 | ATCTAGTGTTAGGCACT | 2593 | AUCUAGUGUUAGGCACUAU |
| exon_4 | | | | ATAGTATTTATAT | | AGUAUUUAUAU |
| BCL11A_ | − | ATTA | 1283 | AATGTTCATCTAGTGTT | 2594 | AAUGUUCAUCUAGUGUUAG |
| exon_4 | | | | AGGCACTATAGTA | | GCACUAUAGUA |
| BCL11A_ | − | TTTG | 1284 | AATTAAATGTTCATCTA | 2595 | AAUUAAAUGUUCAUCUAGU |
| exon_4 | | | | GTGTTAGGCACTA | | GUUAGGCACUA |
| BCL11A_ | − | ATTG | 1285 | AAGCTTGTATTTTTAAC | 2596 | AAGCUUGUAUUUUUAACUG |
| exon 4 | | | | TGTTGCTTGTTCT | | UUGCUUGUUCU |
| BCL11A_ | − | TTTT | 1286 | TTTGTACAAAACTTTTT | 2597 | UUUGUACAAAACUUUUUUA |
| exon 4 | | | | TAAATATAAATGT | | AAUAUAAAUGU |
| BCL11A_ | − | CTTC | 1287 | AGGTTGTAAAAAAAAAA | 2598 | AGGUUGUAAAAAAAAAAAA |
| exon 4 | | | | AACATACATTGGG | | CAUACAUUGGG |
| BCL11A_ | − | ATTC | 1288 | TATGCCTTGGATACACA | 2599 | UAUGCCUUGGAUACACACC |
| exon 4 | | | | CCGCTCTTCAGGT | | GCUCUUCAGGU |
| BCL11A_ | − | TTTT | 1289 | TGTACAAAACTTTTTTA | 2600 | UGUACAAAACUUUUUUAAA |
| exon_4 | | | | AATATAAATGTTA | | UAUAAAUGUUA |
| BCL11A_ | − | TTTT | 1290 | GTACAAAACTTTTTTAA | 2601 | GUACAAAACUUUUUUAAAU |
| exon_4 | | | | ATATAAATGTTAA | | AUAAAUGUUAA |
| BCL11A_ | − | TTTG | 1291 | TACAAAACTTTTTTAAA | 2602 | UACAAAACUUUUUUAAAUA |
| exon_4 | | | | TATAAATGTTAAG | | UAAAUGUUAAG |
| BCL11A_ | − | CTTT | 1292 | TTTAAATATAAATGTTA | 2603 | UUUAAAUAUAAAUGUUAAG |
| exon_4 | | | | AGAAAAATTTTTT | | AAAAAUUUUUU |
| BCL11A_ | − | TTTT | 1293 | TTAAATATAAATGTTAA | 2604 | UUAAAUAUAAAUGUUAAGA |
| exon_4 | | | | GAAAAATTTTTTT | | AAAAUUUUUUU |
| BCL11A_ | − | TTTT | 1294 | TAAATATAAATGTTAAG | 2605 | UAAAUAUAAAUGUUAAGAA |
| exon_4 | | | | AAAAATTTTTTTT | | AAAUUUUUUUU |
| BCL11A_ | − | TTTT | 1295 | AAATATAAATGTTAAGA | 2606 | AAAUAUAAAUGUUAAGAAA |
| exon 4 | | | | AAAATTTTTTTTA | | AAUUUUUUUUA |
| BCL11A_ | − | TTTA | 1296 | AATATAAATGTTAAGAA | 2607 | AAUAUAAAUGUUAAGAAAA |
| exon_4 | | | | AAATTTTTTTTAA | | AUUUUUUUUAA |
| BCL11A_ | − | GTTA | 1297 | AGAAAAATTTTTTTTAA | 2608 | AGAAAAAUUUUUUUUAAAA |
| exon_4 | | | | AAAACACTTCATT | | AACACUUCAUU |
| BCL11A_ | − | ATTT | 1298 | TTTTTAAAAAACACTTC | 2609 | UUUUUAAAAAACACUUCAU |
| exon_4 | | | | ATTATGTTTAGGG | | UAUGUUUAGGG |
| BCL11A_ | − | TTTT | 1299 | TTTTAAAAAACACTTCA | 2610 | UUUUAAAAAACACUUCAUU |
| exon_4 | | | | TTATGTTTAGGGG | | AUGUUUAGGGG |
| BCL11A_ | − | TTTT | 1300 | TTTAAAAAACACTTCAT | 2611 | UUUAAAAAACACUUCAUUA |
| exon 4 | | | | TATGTTTAGGGGG | | UGUUUAGGGGG |
| BCL11A_ | − | TTTT | 1301 | TTAAAAAACACTTCATT | 2612 | UUAAAAAACACUUCAUUAU |
| exon_4 | | | | ATGTTTAGGGGGG | | GUUUAGGGGGG |
| BCL11A_ | − | TTTT | 1302 | TAAAAAACACTTCATTA | 2613 | UAAAAAACACUUCAUUAUG |
| exon 4 | | | | TGTTTAGGGGGGA | | UUUAGGGGGGA |
| BCL11A_ | − | TTTT | 1303 | AAAAAACACTTCATTAT | 2614 | AAAAAACACUUCAUUAUGU |
| exon_4 | | | | GTTTAGGGGGGAA | | UUAGGGGGGAA |
| BCL11A_ | − | TTTA | 1304 | AAAAACACTTCATTATG | 2615 | AAAAACACUUCAUUAUGUU |
| exon 4 | | | | TTTAGGGGGGAAC | | UAGGGGGGAAC |
| BCL11A_ | − | CTTC | 1305 | ATTATGTTTAGGGGGGA | 2616 | AUUAUGUUUAGGGGGGAAC |
| exon 4 | | | | ACTGCATTTTAGG | | UGCAUUUUAGG |
| BCL11A_ | − | TTTA | 1306 | AAAATGGTAGTGGAAAT | 2617 | AAAAUGGUAGUGGAAAUUC |
| exon_4 | | | | TCTATGCCTTGGA | | UAUGCCUUGGA |
| BCL11A_ | − | ATTT | 1307 | AAAAATGGTAGTGGAAA | 2618 | AAAAAUGGUAGUGGAAAUU |
| exon_4 | | | | TTCTATGCCTTGG | | CUAUGCCUUGG |
| BCL11A_ | − | GTTA | 1308 | TCCATTTAAAAATGGTA | 2619 | UCCAUUUAAAAAUGGUAGU |
| exon_4 | | | | GTGGAAATTCTAT | | GGAAAUUCUAU |
| BCL11A_ | − | CTTG | 1309 | TTATCCATTTAAAAATG | 2620 | UUAUCCAUUUAAAAAUGGU |
| exon_4 | | | | GTAGTGGAAATTC | | AGUGGAAAUUC |
| BCL11A_ | − | GTTA | 1310 | CAAGACTTGTTATCCAT | 2621 | CAAGACUUGUUAUCCAUUU |
| exon_4 | | | | TTAAAAATGGTAG | | AAAAAUGGUAG |
| BCL11A_ | − | CTTG | 1311 | GTGGTGTTACAAGACTT | 2622 | GUGGUGUUACAAGACUUGU |
| exon_4 | | | | GTTATCCATTTAA | | UAUCCAUUUAA |
| BCL11A_ | − | CTTG | 1312 | GATACACACCGCTCTTC | 2623 | GAUACACACCGCUCUUCAG |
| exon_4 | | | | AGGTTGTAAAAAA | | GUUGUAAAAAA |
| BCL11A_ | − | ATTG | 1313 | TCTTGGTGGTGTTACAA | 2624 | UCUUGGUGGUGUUACAAGA |
| exon_4 | | | | GACTTGTTATCCA | | CUUGUUAUCCA |
| BCL11A_ | − | TTTA | 1314 | GGGTTCCATTGTCTTGG | 2625 | GGGUUCCAUUGUCUUGGUG |
| exon_4 | | | | TGGTGTTACAAGA | | GUGUUACAAGA |
| BCL11A_ | − | TTTT | 1315 | AGGGTTCCATTGTCTTG | 2626 | AGGGUUCCAUUGUCUUGGU |
| exon_4 | | | | GTGGTGTTACAAG | | GGUGUUACAAG |
| BCL11A_ | − | ATTT | 1316 | TAGGGTTCCATTGTCTT | 2627 | UAGGGUUCCAUUGUCUUGG |
| exon_4 | | | | GGTGGTGTTACAA | | UGGUGUUACAA |
| BCL11A_ | − | TTTA | 1317 | GGGGGGAACTGCATTTT | 2628 | GGGGGGAACUGCAUUUUAG |
| exon_4 | | | | AGGGTTCCATTGT | | GGUUCCAUUGU |
| BCL11A_ | − | GTTT | 1318 | AGGGGGGAACTGCATTT | 2629 | AGGGGGGAACUGCAUUUUA |
| exon_4 | | | | TAGGGTTCCATTG | | GGGUUCCAUUG |
| BCL11A_ | − | ATTA | 1319 | TGTTTAGGGGGGAACTG | 2630 | UGUUUAGGGGGGAACUGCA |
| exon_4 | | | | CATTTTAGGGTTC | | UUUUAGGGUUC |
| BCL11A_ | − | GTTC | 1320 | CATTGTCTTGGTGGTGT | 2631 | CAUUGUCUUGGUGGUGUUA |
| exon_4 | | | | TACAAGACTTGTT | | CAAGACUUGUU |
| BCL11A_ | + | TTTA | 1321 | CCTGCAAAATAATACAA | 2632 | CCUGCAAAAUAAUACAACA |
| exon_4 | | | | CACCAACATCAAT | | CCAACAUCAAU |

[0163] The invention includes all combinations of the direct repeats and spacers listed above, consistent with the disclosure herein.

[0164] In some embodiments, one or more RNA guides disrupt the GATAA motif of the enhancer region of the BCL11A gene. In some embodiments, two RNA guides disrupt the GATAA motif of the enhancer region of the BCL11A gene. For example, in some embodiments, the RNA guide of SEQ ID NO: 2677 (or an RNA guide with at least 80%, 81%, 82%, 83%, 84%, 85%, 86%, 87%, 88%, 89%, 90%, 91%, 92%, 93%, 94%, 95%, 96%, 97%, 98% or 99% identity to SEQ ID NO: 2677) and the RNA guide of SEQ ID NO: 2678 (or an RNA guide with at least 80%, 81%, 82%, 83%, 84%, 85%, 86%, 87%, 88%, 89%, 90%, 91%, 92%, 93%, 94%, 95%, 96%, 97%, 98% or 99% identity to SEQ ID NO: 2678) disrupt the GATAA motif. In other embodiments, the RNA guide of SEQ ID NO: 2677 (or an RNA guide with at least 80%, 81%, 82%, 83%, 84%, 85%, 86%, 87%, 88%, 89%, 90%, 91%, 92%, 93%, 94%, 95%, 96%, 97%, 98% or 99% identity to SEQ ID NO: 2677) and the RNA guide of SEQ ID NO: 2679 (or an RNA guide with at least 80%, 81%, 82%, 83%, 84%, 85%, 86%, 87%, 88%, 89%, 90%, 91%, 92%, 93%, 94%, 95%, 96%, 97%, 98% or 99% identity to SEQ ID NO: 2679) disrupt the GATAA motif. In yet other embodiments, the RNA guide of SEQ ID NO: 2678 (or an RNA guide with at least 80%, 81%, 82%, 83%, 84%, 85%, 86%, 87%, 88%, 89%, 90%, 91%, 92%, 93%, 94%, 95%, 96%, 97%, 98% or 99% identity to SEQ ID NO: 2678) and the RNA guide of SEQ ID NO: 2679 (or an RNA guide with at least 80%, 81%, 82%, 83%, 84%, 85%, 86%, 87%, 88%, 89%, 90%, 91%, 92%, 93%, 94%, 95%, 96%, 97%, 98% or 99% identity to SEQ ID NO: 2679) disrupt the GATAA motif.

[0165] In embodiments, the RNA guide does not consist of the sequence of

(SEQ ID NO: 2677)
AGAAAUCCGUCUUUCAUUGACGGGAAGCUAGUCUAGUGCAAGC;
(SEQ ID NO: 2678)
AGAAAUCCGUCUUUCAUUGACGGCUGGAGCCUGUGAUAAAAGC;
or
(SEQ ID NO: 2679)
AGAAAUCCGUCUUUCAUUGACGGUACCCCACCCACGCCCCCAC.

[0166] In some embodiments, a spacer sequence described herein comprises a uracil (U). In some embodiments, a spacer sequence described herein comprises a thymine (T). In some embodiments, a spacer sequence according to Table 5 comprises a sequence comprising a thymine in one or more places indicated as uracil in Table 5.

[0167] Modifications

[0168] The RNA guide may include one or more covalent modifications with respect to a reference sequence, in particular the parent polyribonucleotide, which are included within the scope of this invention.

[0169] Exemplary modifications can include any modification to the sugar, the nucleobase, the internucleoside linkage (e.g. to a linking phosphate/to a phosphodiester linkage/to the phosphodiester backbone), and any combination thereof. Some of the exemplary modifications provided herein are described in detail below.

[0170] The RNA guide may include any useful modification, such as to the sugar, the nucleobase, or the internucleoside linkage (e.g. to a linking phosphate/to a phosphodiester linkage/to the phosphodiester backbone). One or more atoms of a pyrimidine nucleobase may be replaced or substituted with optionally substituted amino, optionally substituted thiol, optionally substituted alkyl (e.g., methyl or ethyl), or halo (e.g., chloro or fluoro). In certain embodiments, modifications (e.g., one or more modifications) are present in each of the sugar and the internucleoside linkage. Modifications may be modifications of ribonucleic acids (RNAs) to deoxyribonucleic acids (DNAs), threose nucleic acids (TNAs), glycol nucleic acids (GNAs), peptide nucleic acids (PNAs), locked nucleic acids (LNAs) or hybrids thereof). Additional modifications are described herein.

[0171] In some embodiments, the modification may include a chemical or cellular induced modification. For example, some nonlimiting examples of intracellular RNA modifications are described by Lewis and Pan in “RNA modifications and structures cooperate to guide RNA-protein interactions” from Nat Reviews Mol Cell Biol, 2017, 18:202-210.

[0172] Different sugar modifications, nucleotide modifications, and/or internucleoside linkages (e.g., backbone structures) may exist at various positions in the sequence. One of ordinary skill in the art will appreciate that the nucleotide analogs or other modification(s) may be located at any position(s) of the sequence, such that the function of the sequence is not substantially decreased. The sequence may include from about 1% to about 100% modified nucleotides (either in relation to overall nucleotide content, or in relation to one or more types of nucleotide, i.e. any one or more of A, G, U or C) or any intervening percentage (e.g., from 1% to 20%>, from 1% to 25%, from 1% to 50%, from 1% to 60%, from 1% to 70%, from 1% to 80%, from 1% to 90%, from 1% to 95%, from 10% to 20%, from 10% to 25%, from 10% to 50%, from 10% to 60%, from 10% to 70%, from 10% to 80%, from 10% to 90%, from 10% to 95%, from 10% to 100%, from 20% to 25%, from 20% to 50%, from 20% to 60%, from 20% to 70%, from 20% to 80%, from 20% to 90%, from 20% to 95%, from 20% to 100%, from 50% to 60%, from 50% to 70%, from 50% to 80%, from 50% to 90%, from 50% to 95%, from 50% to 100%, from 70% to 80%, from 70% to 90%, from 70% to 95%, from 70% to 100%, from 80% to 90%, from 80% to 95%, from 80% to 100%, from 90% to 95%, from 90% to 100%, and from 95% to 100%).

[0173] In some embodiments, sugar modifications (e.g., at the 2′ position or 4′ position) or replacement of the sugar at one or more ribonucleotides of the sequence may, as well as backbone modifications, include modification or replacement of the phosphodiester linkages. Specific examples of a sequence include, but are not limited to, sequences including modified backbones or no natural internucleoside linkages such as internucleoside modifications, including modification or replacement of the phosphodiester linkages. Sequences having modified backbones include, among others, those that do not have a phosphorus atom in the backbone. For the purposes of this application, and as sometimes referenced in the art, modified RNAs that do not have a phosphorus atom in their internucleoside backbone can also be considered to be oligonucleosides. In particular embodiments, a sequence will include ribonucleotides with a phosphorus atom in its internucleoside backbone.

[0174] Modified sequence backbones may include, for example, phosphorothioates, chiral phosphorothioates, phosphorodithioates, phosphotriesters, aminoalkylphosphotriesters, methyl and other alkyl phosphonates such as 3′-alkylene phosphonates and chiral phosphonates, phosphinates, phosphoramidates such as 3′-amino phosphoramidate and aminoalkylphosphoramidates, thionophosphoramidates, thionoalkylphosphonates, thionoalkylphosphotriesters, and boranophosphates having normal 3′-5′ linkages, 2′-5′ linked analogs of these, and those having inverted polarity wherein the adjacent pairs of nucleoside units are linked 3′-5′ to 5′-3′ or 2′-5′ to 5′-2′. Various salts, mixed salts and free acid forms are also included. In some embodiments, the sequence may be negatively or positively charged.

[0175] The modified nucleotides, which may be incorporated into the sequence, can be modified on the internucleoside linkage (e.g., phosphate backbone). Herein, in the context of the polynucleotide backbone, the phrases “phosphate” and “phosphodiester” are used interchangeably. Backbone phosphate groups can be modified by replacing one or more of the oxygen atoms with a different substituent. Further, the modified nucleosides and nucleotides can include the wholesale replacement of an unmodified phosphate moiety with another internucleoside linkage as described herein. Examples of modified phosphate groups include, but are not limited to, phosphorothioate, phosphoroselenates, boranophosphates, boranophosphate esters, hydrogen phosphonates, phosphoramidates, phosphorodiamidates, alkyl or aryl phosphonates, and phosphotriesters. Phosphorodithioates have both non-linking oxygens replaced by sulfur. The phosphate linker can also be modified by the replacement of a linking oxygen with nitrogen (bridged phosphoramidates), sulfur (bridged phosphorothioates), and carbon (bridged methylene-phosphonates).

[0176] The α-thio substituted phosphate moiety is provided to confer stability to RNA and DNA polymers through the unnatural phosphorothioate backbone linkages. Phosphorothioate DNA and RNA have increased nuclease resistance and subsequently a longer half-life in a cellular environment.

[0177] In specific embodiments, a modified nucleoside includes an alpha-thio-nucleoside (e.g., 5′-O-(1-thiophosphate)-adenosine, 5′-O-(1-thiophosphate)-cytidine (α-thio-cytidine), 5′-O-(1-thiophosphate)-guanosine, 5′-O-(1-thiophosphate)-uridine, or 5′-O-(1-thiophosphate)-pseudouridine).

[0178] Other internucleoside linkages that may be employed according to the present invention, including internucleoside linkages which do not contain a phosphorous atom, are described herein.

[0179] In some embodiments, the sequence may include one or more cytotoxic nucleosides. For example, cytotoxic nucleosides may be incorporated into sequence, such as bifunctional modification. Cytotoxic nucleoside may include, but are not limited to, adenosine arabinoside, 5-azacytidine, 4′-thio-aracytidine, cyclopentenylcytosine, cladribine, clofarabine, cytarabine, cytosine arabinoside, 1-(2-C-cyano-2-deoxy-beta-D-arabino-pentofuranosyl)-cytosine, decitabine, 5-fluorouracil, fludarabine, floxuridine, gemcitabine, a combination of tegafur and uracil, tegafur ((RS)-5-fluoro-1-(tetrahydrofuran-2-yl)pyrimidine-2,4(1H,3H)-dione), troxacitabine, tezacitabine, 2′-deoxy-2′-methylidenecytidine (DMDC), and 6-mercaptopurine. Additional examples include fludarabine phosphate, N4-behenoyl-1-beta-D-arabinofuranosylcytosine, N4-octadecyl-1-beta-D-arabinofuranosylcytosine, N4-palmitoyl-1-(2-C-cyano-2-deoxy-beta-D-arabino-pentofuranosyl) cytosine, and P-4055 (cytarabine 5′-elaidic acid ester).

[0180] In some embodiments, the sequence includes one or more post-transcriptional modifications (e.g., capping, cleavage, polyadenylation, splicing, poly-A sequence, methylation, acylation, phosphorylation, methylation of lysine and arginine residues, acetylation, and nitrosylation of thiol groups and tyrosine residues, etc). The one or more post-transcriptional modifications can be any post-transcriptional modification, such as any of the more than one hundred different nucleoside modifications that have been identified in RNA (Rozenski, J, Crain, P, and McCloskey, J. (1999). The RNA Modification Database: 1999 update. Nucl Acids Res 27: 196-197) In some embodiments, the first isolated nucleic acid comprises messenger RNA (mRNA). In some embodiments, the mRNA comprises at least one nucleoside selected from the group consisting of pyridin-4-one ribonucleoside, 5-aza-uridine, 2-thio-5-aza-uridine, 2-thiouridine, 4-thio-pseudouridine, 2-thio-pseudouridine, 5-hydroxyuridine, 3-methyluridine, 5-carboxymethyl-uridine, 1-carboxymethyl-pseudouridine, 5-propynyl-uridine, 1-propynyl-pseudouridine, 5-taurinomethyluridine, 1-taurinomethyl-pseudouridine, 5-taurinomethyl-2-thio-uridine, 1-taurinomethyl-4-thio-uridine, 5-methyl-uridine, 1-methyl-pseudouridine, 4-thio-1-methyl-pseudouridine, 2-thio-1-methyl-pseudouridine, 1-methyl-1-deaza-pseudouridine, 2-thio-1-methyl-1-deaza-pseudouridine, dihydrouridine, dihydropseudouridine, 2-thio-dihydrouridine, 2-thio-dihydropseudouridine, 2-methoxyuridine, 2-methoxy-4-thio-uridine, 4-methoxy-pseudouridine, and 4-methoxy-2-thio-pseudouridine. In some embodiments, the mRNA comprises at least one nucleoside selected from the group consisting of 5-aza-cytidine, pseudoisocytidine, 3-methyl-cytidine, N4-acetylcytidine, 5-formylcytidine, N4-methylcytidine, 5-hydroxymethylcytidine, 1-methyl-pseudoisocytidine, pyrrolo-cytidine, pyrrolo-pseudoisocytidine, 2-thio-cytidine, 2-thio-5-methyl-cytidine, 4-thio-pseudoisocytidine, 4-thio-1-methyl-pseudoisocytidine, 4-thio-1-methyl-1-deaza-pseudoisocytidine, 1-methyl-1-deaza-pseudoisocytidine, zebularine, 5-aza-zebularine, 5-methyl-zebularine, 5-aza-2-thio-zebularine, 2-thio-zebularine, 2-methoxy-cytidine, 2-methoxy-5-methyl-cytidine, 4-methoxy-pseudoisocytidine, and 4-methoxy-1-methyl-pseudoisocytidine. In some embodiments, the mRNA comprises at least one nucleoside selected from the group consisting of 2-aminopurine, 2, 6-diaminopurine, 7-deaza-adenine, 7-deaza-8-aza-adenine, 7-deaza-2-aminopurine, 7-deaza-8-aza-2-aminopurine, 7-deaza-2,6-diaminopurine, 7-deaza-8-aza-2,6-diaminopurine, 1-methyladenosine, N6-methyladenosine, N6-isopentenyladenosine, N6-(cis-hydroxyisopentenyl)adenosine, 2-methylthio-N6-(cis-hydroxyisopentenyl) adenosine, N6-glycinylcarbamoyladenosine, N6-threonylcarbamoyladenosine, 2-methylthio-N6-threonyl carbamoyladenosine, N6,N6-dimethyladenosine, 7-methyladenine, 2-methylthio-adenine, and 2-methoxy-adenine. In some embodiments, mRNA comprises at least one nucleoside selected from the group consisting of inosine, 1-methyl-inosine, wyosine, wybutosine, 7-deaza-guanosine, 7-deaza-8-aza-guanosine, 6-thio-guanosine, 6-thio-7-deaza-guanosine, 6-thio-7-deaza-8-aza-guanosine, 7-methyl-guanosine, 6-thio-7-methyl-guanosine, 7-methylinosine, 6-methoxy-guanosine, 1-methylguanosine, N2-methylguanosine, N2,N2-dimethylguanosine, 8-oxo-guanosine, 7-methyl-8-oxo-guanosine, 1-methyl-6-thio-guanosine, N2-methyl-6-thio-guanosine, and N2,N2-dimethyl-6-thio-guanosine.

[0181] The sequence may or may not be uniformly modified along the entire length of the molecule. For example, one or more or all types of nucleotide (e.g., naturally-occurring nucleotides, purine or pyrimidine, or any one or more or all of A, G, U, C, I, pU) may or may not be uniformly modified in the sequence, or in a given predetermined sequence region thereof. In some embodiments, the sequence includes a pseudouridine. In some embodiments, the sequence includes an inosine, which may aid in the immune system characterizing the sequence as endogenous versus viral RNAs. The incorporation of inosine may also mediate improved RNA stability/reduced degradation. See for example, Yu, Z. et al. (2015) RNA editing by ADAR1 marks dsRNA as “self”. Cell Res. 25, 1283-1284, which is incorporated by reference in its entirety.

### Cas12i Polypeptide

[0182] In some embodiments, the composition of the present invention includes a Cas12i polypeptide as described in PCT/US2019/022375.

[0183] In some embodiments, the composition of the present invention includes a Cas12i2 polypeptide described herein (e.g., a polypeptide comprising SEQ ID NO: 2634 and/or encoded by SEQ ID NO: 2633). In some embodiments, the Cas12i2 polypeptide comprises at least one RuvC domain.

[0184] A nucleic acid sequence encoding the Cas12i2 polypeptide described herein may be substantially identical to a reference nucleic acid sequence, e.g., SEQ ID NO: 2633. In some embodiments, the Cas12i2 polypeptide is encoded by a nucleic acid comprising a sequence having least about 60%, at least about 65%, at least about 70%, at least about 75%, at least about 80%, at least about 85%, at least about 90%, at least about 91%, at least about 92%, at least about 93%, at least about 94%, at least about 95%, at least about 96%, at least about 97%, at least about 98%, at least about 99%, or at least about 99.5% sequence identity to the reference nucleic acid sequence, e.g., SEQ ID NO: 2633. The percent identity between two such nucleic acids can be determined manually by inspection of the two optimally aligned nucleic acid sequences or by using software programs or algorithms (e.g., BLAST, ALIGN, CLUSTAL) using standard parameters. One indication that two nucleic acid sequences are substantially identical is that the nucleic acid molecules hybridize to the complementary sequence of the other under stringent conditions of temperature and ionic strength (e.g., within a range of medium to high stringency). See, e.g., Tijssen, “Hybridization with Nucleic Acid Probes. Part I. Theory and Nucleic Acid Preparation” (Laboratory Techniques in Biochemistry and Molecular Biology, Vol 24).

[0185] In some embodiments, the Cas12i2 polypeptide is encoded by a nucleic acid sequence having at least about 60%, at least about 65%, at least about 70%, at least about 75%, at least about 80%, at least about 85%, at least about 90%, at least about 91%, at least about 92%, at least about 93%, at least about 94%, at least about 95%, at least about 96%, at least about 97%, at least about 98%, at least about 99%, or more sequence identity, but not 100% sequence identity, to a reference nucleic acid sequence, e.g., SEQ ID NO: 2633.

[0186] In some embodiments, the Cas12i2 polypeptide of the present invention comprises a polypeptide sequence having at least 50%, 60%, 65%, 70%, 75%, 80%, 85%, 90%, 91%, 92%, 93%, 94%, 95%, 96%, 97%, 98%, 99%, or 100% identity to SEQ ID NO: 2634.

[0187] In some embodiments, the present invention describes a Cas12i2 polypeptide having a specified degree of amino acid sequence identity to one or more reference polypeptides, e.g., at least 60%, at least 65%, at least 70%, at least 75%, at least 80%, at least 85%, at least 90%, at least 91%, at least 92%, at least 93%, at least 94%, at least 95%, at least 96%, at least 97%, at least 98%, or even at least 99%, but not 100%, sequence identity to the amino acid sequence of SEQ ID NO: 2634. Homology or identity can be determined by amino acid sequence alignment, e.g., using a program such as BLAST, ALIGN, or CLUSTAL, as described herein.

[0188] Also provided is a Cas12i2 polypeptide of the present invention having enzymatic activity, e.g., nuclease or endonuclease activity, and comprising an amino acid sequence which differs from the amino acid sequences of SEQ ID NO: 2634 by 50, 40, 35, 30, 25, 20, 19, 18, 17, 16, 15, 14, 13, 12, 11, 10, 9, 8, 7, 6, 5, 4, 3, 2, 1, or 0 amino acid residue(s), when aligned using any of the previously described alignment methods.

[0189] In some embodiments, the Cas12i2 polypeptide comprises a polypeptide having a sequence of SEQ ID NO: 2641, SEQ ID NO: 2642, SEQ ID NO: 2643, SEQ ID NO: 2644, or SEQ ID NO: 2645.

[0190] In some embodiments, the Cas12i2 polypeptide of the present invention comprises a polypeptide sequence having at least 50%, 60%, 65%, 70%, 75%, 80%, 85%, 90%, 91%, 92%, 93%, 94%, 95%, 96%, 97%, 98%, 99%, or 100% identity to SEQ ID NO: 2641, SEQ ID NO: 2642, SEQ ID NO: 2643, SEQ ID NO: 2644, or SEQ ID NO: 2645. In some embodiments, a Cas12i2 polypeptide having at least 50%, 60%, 65%, 70%, 75%, 80%, 85%, 90%, 91%, 92%, 93%, 94%, 95%, 96%, 97%, 98%, 99%, or 100% identity to SEQ ID NO: 2641, SEQ ID NO: 2642, SEQ ID NO: 2643, SEQ ID NO: 2644, or SEQ ID NO: 2645 maintains the amino acid changes (or at least 1, 2, 3 etc. of these changes) that differentiate it from its respective parent/reference sequence.

[0191] In some embodiments, the present invention describes a Cas12i2 polypeptide having a specified degree of amino acid sequence identity to one or more reference polypeptides, e.g., at least 60%, at least 65%, at least 70%, at least 75%, at least 80%, at least 85%, at least 90%, at least 91%, at least 92%, at least 93%, at least 94%, at least 95%, at least 96%, at least 97%, at least 98%, or even at least 99%, but not 100%, sequence identity to the amino acid sequence of SEQ ID NO: 2641, SEQ ID NO: 2642, SEQ ID NO: 2643, SEQ ID NO: 2644, or SEQ ID NO: 2645. Homology or identity can be determined by amino acid sequence alignment, e.g., using a program such as BLAST, ALIGN, or CLUSTAL, as described herein.

[0192] Also provided is a Cas12i2 polypeptide of the present invention having enzymatic activity, e.g., nuclease or endonuclease activity, and comprising an amino acid sequence which differs from the amino acid sequences of SEQ ID NO: 2641, SEQ ID NO: 2642, SEQ ID NO: 2643, SEQ ID NO: 2644, or SEQ ID NO: 2645 by 50, 40, 35, 30, 25, 20, 19, 18, 17, 16, 15, 14, 13, 12, 11, 10, 9, 8, 7, 6, 5, 4, 3, 2, 1, or 0 amino acid residue(s), when aligned using any of the previously described alignment methods.

[0193] In some embodiments, the composition of the present invention includes a Cas12i4 polypeptide described herein (e.g., a polypeptide comprising SEQ ID NO: 2647 and/or encoded by SEQ ID NO: 2646). In some embodiments, the Cas12i4 polypeptide comprises at least one RuvC domain.

[0194] A nucleic acid sequence encoding the Cas12i4 polypeptide described herein may be substantially identical to a reference nucleic acid sequence, e.g., SEQ ID NO: 2646. In some embodiments, the Cas12i4 polypeptide is encoded by a nucleic acid comprising a sequence having least about 60%, at least about 65%, at least about 70%, at least about 75%, at least about 80%, at least about 85%, at least about 90%, at least about 91%, at least about 92%, at least about 93%, at least about 94%, at least about 95%, at least about 96%, at least about 97%, at least about 98%, at least about 99%, or at least about 99.5% sequence identity to the reference nucleic acid sequence, e.g., SEQ ID NO: 2646. The percent identity between two such nucleic acids can be determined manually by inspection of the two optimally aligned nucleic acid sequences or by using software programs or algorithms (e.g., BLAST, ALIGN, CLUSTAL) using standard parameters. One indication that two nucleic acid sequences are substantially identical is that the nucleic acid molecules hybridize to the complementary sequence of the other under stringent conditions of temperature and ionic strength (e.g., within a range of medium to high stringency).

[0195] In some embodiments, the Cas12i4 polypeptide is encoded by a nucleic acid sequence having at least about 60%, at least about 65%, at least about 70%, at least about 75%, at least about 80%, at least about 85%, at least about 90%, at least about 91%, at least about 92%, at least about 93%, at least about 94%, at least about 95%, at least about 96%, at least about 97%, at least about 98%, at least about 99%, or more sequence identity, but not 100% sequence identity, to a reference nucleic acid sequence, e.g., SEQ ID NO: 2646.

[0196] In some embodiments, the Cas12i4 polypeptide of the present invention comprises a polypeptide sequence having at least 50%, 60%, 65%, 70%, 75%, 80%, 85%, 90%, 91%, 92%, 93%, 94%, 95%, 96%, 97%, 98%, 99%, or 100% identity to SEQ ID NO: 2647.

[0197] In some embodiments, the present invention describes a Cas12i4 polypeptide having a specified degree of amino acid sequence identity to one or more reference polypeptides, e.g., at least 60%, at least 65%, at least 70%, at least 75%, at least 80%, at least 85%, at least 90%, at least 91%, at least 92%, at least 93%, at least 94%, at least 95%, at least 96%, at least 97%, at least 98%, or even at least 99%, but not 100%, sequence identity to the amino acid sequence of SEQ ID NO: 2647. Homology or identity can be determined by amino acid sequence alignment, e.g., using a program such as BLAST, ALIGN, or CLUSTAL, as described herein.

[0198] Also provided is a Cas12i4 polypeptide of the present invention having enzymatic activity, e.g., nuclease or endonuclease activity, and comprising an amino acid sequence which differs from the amino acid sequences of SEQ ID NO: 2647 by 50, 40, 35, 30, 25, 20, 19, 18, 17, 16, 15, 14, 13, 12, 11, 10, 9, 8, 7, 6, 5, 4, 3, 2, 1, or 0 amino acid residue(s), when aligned using any of the previously described alignment methods.

[0199] In some embodiments, the Cas12i4 polypeptide comprises a polypeptide having a sequence of SEQ ID NO: 2648 or SEQ ID NO: 2649.

[0200] In some embodiments, the Cas12i4 polypeptide of the present invention comprises a polypeptide sequence having at least 50%, 60%, 65%, 70%, 75%, 80%, 85%, 90%, 91%, 92%, 93%, 94%, 95%, 96%, 97%, 98%, 99%, or 100% identity to SEQ ID NO: 2648 or SEQ ID NO: 2649. In some embodiments, a Cas12i4 polypeptide having at least 50%, 60%, 65%, 70%, 75%, 80%, 85%, 90%, 91%, 92%, 93%, 94%, 95%, 96%, 97%, 98%, 99%, or 100% identity to SEQ ID NO: 2648 or SEQ ID NO: 2649 maintains the amino acid changes (or at least 1, 2, 3 etc, of these changes) that differentiate it from its respective parent/reference sequence.

[0201] In some embodiments, the present invention describes a Cas12i4 polypeptide having a specified degree of amino acid sequence identity to one or more reference polypeptides, e.g., at least 60%, at least 65%, at least 70%, at least 75%, at least 80%, at least 85%, at least 90%, at least 91%, at least 92%, at least 93%, at least 94%, at least 95%, at least 96%, at least 97%, at least 98%, or even at least 99%, but not 100%, sequence identity to the amino acid sequence of SEQ ID NO: 2648 or SEQ ID NO: 2649. Homology or identity can be determined by amino acid sequence alignment, e.g., using a program such as BLAST, ALIGN, or CLUSTAL, as described herein.

[0202] Also provided is a Cas12i4 polypeptide of the present invention having enzymatic activity, e.g., nuclease or endonuclease activity, and comprising an amino acid sequence which differs from the amino acid sequences of SEQ ID NO: 2648 or SEQ ID NO: 2649 by 50, 40, 35, 30, 25, 20, 19, 18, 17, 16, 15, 14, 13, 12, 11, 10, 9, 8, 7, 6, 5, 4, 3, 2, 1, or 0 amino acid residue(s), when aligned using any of the previously described alignment methods.

[0203] In some embodiments, the composition of the present invention includes a Cas12i1 polypeptide described herein (e.g., a polypeptide comprising SEQ ID NO: 2650). In some embodiments, the Cas12i4 polypeptide comprises at least one RuvC domain.

[0204] In some embodiments, the Cas12i1 polypeptide of the present invention comprises a polypeptide sequence having at least 50%, 60%, 65%, 70%, 75%, 80%, 85%, 90%, 91%, 92%, 93%, 94%, 95%, 96%, 97%, 98%, 99%, or 100% identity to SEQ ID NO: 2650.

[0205] In some embodiments, the present invention describes a Cas12i1 polypeptide having a specified degree of amino acid sequence identity to one or more reference polypeptides, e.g., at least 60%, at least 65%, at least 70%, at least 75%, at least 80%, at least 85%, at least 90%, at least 91%, at least 92%, at least 93%, at least 94%, at least 95%, at least 96%, at least 97%, at least 98%, or even at least 99%, but not 100%, sequence identity to the amino acid sequence of SEQ ID NO: 2650. Homology or identity can be determined by amino acid sequence alignment, e.g., using a program such as BLAST, ALIGN, or CLUSTAL, as described herein.

[0206] Also provided is a Cas12i1 polypeptide of the present invention having enzymatic activity, e.g., nuclease or endonuclease activity, and comprising an amino acid sequence which differs from the amino acid sequences of SEQ ID NO: 2650 by 50, 40, 35, 30, 25, 20, 19, 18, 17, 16, 15, 14, 13, 12, 11, 10, 9, 8, 7, 6, 5, 4, 3, 2, 1, or 0 amino acid residue(s), when aligned using any of the previously described alignment methods.

[0207] In some embodiments, the composition of the present invention includes a Cas12i3 polypeptide described herein (e.g., a polypeptide comprising SEQ ID NO: 2651). In some embodiments, the Cas12i4 polypeptide comprises at least one RuvC domain.

[0208] In some embodiments, the Cas12i3 polypeptide of the present invention comprises a polypeptide sequence having at least 50%, 60%, 65%, 70%, 75%, 80%, 85%, 90%, 91%, 92%, 93%, 94%, 95%, 96%, 97%, 98%, 99%, or 100% identity to SEQ ID NO: 2651.

[0209] In some embodiments, the present invention describes a Cas12i3 polypeptide having a specified degree of amino acid sequence identity to one or more reference polypeptides, e.g., at least 60%, at least 65%, at least 70%, at least 75%, at least 80%, at least 85%, at least 90%, at least 91%, at least 92%, at least 93%, at least 94%, at least 95%, at least 96%, at least 97%, at least 98%, or even at least 99%, but not 100%, sequence identity to the amino acid sequence of SEQ ID NO: 2651. Homology or identity can be determined by amino acid sequence alignment, e.g., using a program such as BLAST, ALIGN, or CLUSTAL, as described herein.

[0210] Also provided is a Cas12i3 polypeptide of the present invention having enzymatic activity, e.g., nuclease or endonuclease activity, and comprising an amino acid sequence which differs from the amino acid sequences of SEQ ID NO: 2651 by 50, 40, 35, 30, 25, 20, 19, 18, 17, 16, 15, 14, 13, 12, 11, 10, 9, 8, 7, 6, 5, 4, 3, 2, 1, or 0 amino acid residue(s), when aligned using any of the previously described alignment methods.

[0211] Although the changes described herein may be one or more amino acid changes, changes to the Cas12i polypeptide may also be of a substantive nature, such as fusion of polypeptides as amino- and/or carboxyl-terminal extensions. For example, the Cas12i polypeptide may contain additional peptides, e.g., one or more peptides. Examples of additional peptides may include epitope peptides for labelling, such as a polyhistidine tag (His-tag), Myc, and FLAG. In some embodiments, the Cas12i polypeptide described herein can be fused to a detectable moiety such as a fluorescent protein (e.g., green fluorescent protein (GFP) or yellow fluorescent protein (YFP)).

[0212] In some embodiments, the Cas12i polypeptide comprises at least one (e.g., two, three, four, five, six, or more) nuclear localization signal (NLS). In some embodiments, the Cas12i polypeptide comprises at least one (e.g., two, three, four, five, six, or more) nuclear export signal (NES). In some embodiments, the Cas12i polypeptide comprises at least one (e.g., two, three, four, five, six, or more) NLS and at least one (e.g., two, three, four, five, six, or more) NES.

[0213] In some embodiments, the Cas12i polypeptide described herein can be self-inactivating. See, Epstein et al., “Engineering a Self-Inactivating CRISPR System for AAV Vectors,” Mol. Ther., 24 (2016): S50, which is incorporated by reference in its entirety.

[0214] In some embodiments, the nucleotide sequence encoding the Cas12i polypeptide described herein can be codon-optimized for use in a particular host cell or organism. For example, the nucleic acid can be codon-optimized for any non-human eukaryote including mice, rats, rabbits, dogs, livestock, or non-human primates. Codon usage tables are readily available, for example, at the “Codon Usage Database” available at www.kazusa.orjp/codon/and these tables can be adapted in a number of ways. See Nakamura et al. Nucl. Acids Res. 28:292 (2000), which is incorporated herein by reference in its entirety. Computer algorithms for codon optimizing a particular sequence for expression in a particular host cell are also available, such as Gene Forge (Aptagen; Jacobus, PA).

### Target Sequence

[0215] In some embodiments, the target sequence is within a BCL11A gene or a locus of a BCL11A gene. In some embodiments, the BCL11A gene is a mammalian gene. In some embodiments, the BCL11A gene is a human gene. For example, in some embodiments, the target sequence is within the sequence of SEQ ID NO: 2635 or the reverse complement thereof. In some embodiments, the target sequence is within an exon or enhancer region of the BCL11A gene set forth in SEQ ID NO: 2635 (or the reverse complement thereof), e.g., within a sequence of SEQ ID NO: 2636, 2637, 2638, 2639, or 2640 (or a reverse complement thereof). Target sequences within an exon or enhancer region of the BCL11A gene of SEQ ID NO: 2635 (and the reverse complement thereof) are set forth in Table 5. In some embodiments, the target sequence is within an intron of the BCL11A gene set forth in SEQ ID NO: 2635 or the reverse complement thereof. In some embodiments, the target sequence is within a variant (e.g., a polymorphic variant) of the BCL11A gene sequence set forth in SEQ ID NO: 2635 or the reverse complement thereof. In some embodiments, the BCL11A gene sequence is a homolog of the sequence set forth in SEQ ID NO: 2635 or the reverse complement thereof. For examples, in some embodiments, the BCL11A gene sequence is a non-human BCL11A sequence.

[0216] In some embodiments, the target sequence is adjacent to a 5′-NTTN-3′ PAM sequence, wherein N is any nucleotide. The 5′-NTTN-3′ sequence may be immediately adjacent to the target sequence or, for example, within a small number (e.g., 1, 2, 3, 4, or 5) of nucleotides of the target sequence. In some embodiments the 5′-NTTN-3′ sequence is 5′-NTTY-3′, 5′-NTTC-3′, 5′-NTTT-3′, 5′-NTTA-3′, 5′-NTTB-3′, 5′-NTTG-3′, 5′-CTTY-3′, 5‘-DTTR’3′, 5′-CTTR-3′, 5′-DTTT-3′, 5′-ATTN-3′, or 5′-GTTN-3′, wherein Y is C or T, B is any nucleotide except for A, D is any nucleotide except for C, and R is A or G. In some embodiments, the 5′-NTTN-3′ sequence is 5′-ATTA-3′, 5′-ATTT-3′, 5′-ATTG-3′, 5′-ATTC-3′, 5′-TTTA-3′, 5′-TTTT-3′, 5′-TTTG-3′, 5′-TTTC-3′, 5′-GTTA-3′, 5′-GTTT-3′, 5′-GTTG-3′, 5′-GTTC-3′, 5′-CTTA-3′, 5′-CTTT-3′, 5′-CTTG-3′, or 5′-CTTC-3′.

[0217] In some embodiments, the target sequence is single-stranded (e.g., single-stranded DNA). In some embodiments, the target sequence is double-stranded (e.g., double-stranded DNA). In some embodiments, the target sequence comprises both single-stranded and double-stranded regions. In some embodiments, the target sequence is linear. In some embodiments, the target sequence is circular. In some embodiments, the target sequence comprises one or more modified nucleotides, such as methylated nucleotides, damaged nucleotides, or nucleotides analogs. In some embodiments, the target sequence is not modified. In some embodiments, the RNA guide binds to a first strand of a double-stranded target sequence (e.g., the target strand or the spacer-complementary strand), and the 5′-NTTN-3′ PAM sequence is present in the second, complementary strand (e.g., the non-target strand or the non-spacer-complementary strand). In some embodiments, the RNA guide binds adjacent to a 5′-NAAN-3′ sequence on the target strand (e.g., the spacer-complementary strand).

[0218] In some embodiments, the target sequence is present in a cell. In some embodiments, the target sequence is present in the nucleus of the cell. In some embodiments, the target sequence is endogenous to the cell. In some embodiments, the target sequence is a genomic DNA. In some embodiments, the target sequence is a chromosomal DNA. In some embodiments, the target sequence is a protein-coding gene or a functional region thereof, such as a coding region, or a regulatory element, such as a promoter, enhancer, a 5′ or 3′ untranslated region, etc. In some embodiments, the target sequence is a plasmid.

[0219] In some embodiments, the target sequence is present in a readily accessible region of the target sequence. In some embodiments, the target sequence is in an exon of a target gene. In some embodiments, the target sequence is across an exon-intron junction of a target gene. In some embodiments, the target sequence is present in a non-coding region, such as a regulatory region of a gene. In some embodiments, wherein the target sequence is exogenous to a cell, the target sequence comprises a sequence that is not found in the genome of the cell.

[0220] In some embodiments, the target sequence is exogenous to a cell. In some embodiments, the target sequence is a horizontally transferred plasmid. In some embodiments, the target sequence is integrated in the genome of the cell. In some embodiments, the target sequence is not integrated in the genome of the cell. In some embodiments, the target sequence is a plasmid in the cell. In some embodiments, the target sequence is present in an extrachromosomal array.

[0221] In some embodiments, the target sequence is an isolated nucleic acid, such as an isolated DNA or an isolated RNA. In some embodiments, the target sequence is present in a cell-free environment. In some embodiments, the target sequence is an isolated vector, such as a plasmid. In some embodiments, the target sequence is an ultrapure plasmid.

[0222] The target sequence is a locus of the BCL11A gene that hybridizes to the RNA guide. In some embodiments, a cell has only one copy of the target sequence. In some embodiments, a cell has more than one copy, such as at least about any one of 2, 3, 4, 5, 10, 100, or more copies of the target sequence.

[0223] In some embodiments, a BCL11A target sequence is selected to be edited by a Cas12i polypeptide and an RNA guide using one or more of the following criteria. First, in some embodiments, a target sequence near the 5′ end of the BCL11A coding sequence is selected. For example, in some embodiments, an RNA guide is designed to target a sequence in exon 1 (SEQ ID NO: 2636), exon 2 (SEQ ID NO: 2637), or the enhancer region (SEQ ID NO: 2640). Second, in some embodiments, a target sequence adjacent to a 5′-CTTY-3′ PAM sequence is selected. For example, in some embodiments, an RNA guide is designed to target a sequence adjacent to a 5′-CTTT-3′ or 5′-CTTC-3′ sequence. Third, in some embodiments, a target sequence having low sequence similarity to other genomic sequences is selected. For example, for each target sequence, potential non-target sites can be identified by searching for other genomic sequences adjacent to a PAM sequence and calculating the Levenshtein distance between the target sequence and the PAM-adjacent sequences. The Levenshtein distance (e.g., edit distance) corresponds to the minimum number of edits (e.g., insertions, deletions, or substitutions) required to change one sequence into another (e.g., to change the sequence of a potential non-target locus into the sequence of the on-target locus). Following this analysis, RNA guides are designed for target sequences that do not have potential off-target sequences with a Levenshtein distance of 0 or 1.

### Production

[0224] The present invention includes methods for production of the RNA guide, methods for production of the Cas12i polypeptide, and methods for complexing the RNA guide and Cas12i polypeptide.

### RNA Guide

[0225] In some embodiments, the RNA guide is made by in vitro transcription of a DNA template. Thus, for example, in some embodiments, the RNA guide is generated by in vitro transcription of a DNA template encoding the RNA guide using an upstream promoter sequence (e.g., a T7 polymerase promoter sequence). In some embodiments, the DNA template encodes multiple RNA guides or the in vitro transcription reaction includes multiple different DNA templates, each encoding a different RNA guide. In some embodiments, the RNA guide is made using chemical synthetic methods. In some embodiments, the RNA guide is made by expressing the RNA guide sequence in cells transfected with a plasmid including sequences that encode the RNA guide. In some embodiments, the plasmid encodes multiple different RNA guides. In some embodiments, multiple different plasmids, each encoding a different RNA guide, are transfected into the cells. In some embodiments, the RNA guide is expressed from a plasmid that encodes the RNA guide and also encodes a Cas12i polypeptide. In some embodiments, the RNA guide is expressed from a plasmid that expresses the RNA guide but not a Cas12i polypeptide. In some embodiments, the RNA guide is purchased from a commercial vendor. In some embodiments, the RNA guide is synthesized using one or more modified nucleotide, e.g., as described above.

### Cas12i Polypeptide

[0226] In some embodiments, the Cas12i polypeptide of the present invention can be prepared by (a) culturing bacteria which produce the Cas12i polypeptide of the present invention, isolating the Cas12i polypeptide, optionally, purifying the Cas12i polypeptide, and complexing the Cas12i polypeptide with an RNA guide. The Cas12i polypeptide can be also prepared by (b) a known genetic engineering technique, specifically, by isolating a gene encoding the Cas12i polypeptide of the present invention from bacteria, constructing a recombinant expression vector, and then transferring the vector into an appropriate host cell that expresses the RNA guide for expression of a recombinant protein that complexes with the RNA guide in the host cell. Alternatively, the Cas12i polypeptide can be prepared by (c) an in vitro coupled transcription-translation system and then complexing with an RNA guide.

[0227] In some embodiments, a host cell is used to express the Cas12i polypeptide. The host cell is not particularly limited, and various known cells can be preferably used. Specific examples of the host cell include bacteria such as E. coli, yeasts (budding yeast, Saccharomyces cerevisiae, and fission yeast, Schizosaccharomyces pombe), nematodes (Caenorhabditis elegans), Xenopus laevis oocytes, and animal cells (for example, CHO cells, COS cells and HEK293 cells). The method for transferring the expression vector described above into host cells, i.e., the transformation method, is not particularly limited, and known methods such as electroporation, the calcium phosphate method, the liposome method and the DEAE dextran method can be used.

[0228] After a host is transformed with the expression vector, the host cells may be cultured, cultivated or bred, for production of the Cas12i polypeptide. After expression of the Cas12i polypeptide, the host cells can be collected and Cas12i polypeptide purified from the cultures etc. according to conventional methods (for example, filtration, centrifugation, cell disruption, gel filtration chromatography, ion exchange chromatography, etc.).

[0229] In some embodiments, the methods for Cas12i polypeptide expression comprises translation of at least 5 amino acids, at least 10 amino acids, at least 15 amino acids, at least 20 amino acids, at least 50 amino acids, at least 100 amino acids, at least 150 amino acids, at least 200 amino acids, at least 250 amino acids, at least 300 amino acids, at least 400 amino acids, at least 500 amino acids, at least 600 amino acids, at least 700 amino acids, at least 800 amino acids, at least 900 amino acids, or at least 1000 amino acids of the Cas12i polypeptide.

[0230] In some embodiments, the methods for protein expression comprises translation of about 5 amino acids, about 10 amino acids, about 15 amino acids, about 20 amino acids, about 50 amino acids, about 100 amino acids, about 150 amino acids, about 200 amino acids, about 250 amino acids, about 300 amino acids, about 400 amino acids, about 500 amino acids, about 600 amino acids, about 700 amino acids, about 800 amino acids, about 900 amino acids, about 1000 amino acids or more of the Cas12i polypeptide.

[0231] A variety of methods can be used to determine the level of production of a Cas12i polypeptide in a host cell. Such methods include, but are not limited to, for example, methods that utilize either polyclonal or monoclonal antibodies specific for the Cas12i polypeptide or a labeling tag as described elsewhere herein. Exemplary methods include, but are not limited to, enzyme-linked immunosorbent assays (ELISA), radioimmunoassays (MA), fluorescent immunoassays (FIA), and fluorescent activated cell sorting (FACS). These and other assays are well known in the art (See, e.g., Maddox et al., J. Exp. Med. 158:1211 [1983]).

[0232] The present disclosure provides methods of in vivo expression of the Cas12i polypeptide in a cell, comprising providing a polyribonucleotide encoding the Cas12i polypeptide to a host cell wherein the polyribonucleotide encodes the Cas12i polypeptide, expressing the Cas12i polypeptide in the cell, and obtaining the Cas12i polypeptide from the cell.

### Complexing

[0233] In some embodiments, an RNA guide targeting BCL11A is complexed with a Cas12i polypeptide to form a ribonucleoprotein. In some embodiments, complexation of the RNA guide and Cas12i polypeptide occurs at a temperature lower than about any one of 20° C., 21° C., 22° C., 23° C., 24° C., 25° C., 26° C., 27° C., 28° C., 29° C., 30° C., 31° C., 32° C., 33° C., 34° C., 35° C., 36° C., 37° C., 38° C., 39° C., 40° C., 41° C., 42° C., 43° C., 44° C., 45° C., 50° C., or 55° C. In some embodiments, the RNA guide does not dissociate from the Cas12i polypeptide at about 37° C. over an incubation period of at least about any one of 10 mins, 15 mins, 20 mins, 25 mins, 30 mins, 35 mins, 40 mins, 45 mins, 50 mins, 55 mins, 1 hr, 2 hr, 3 hr, 4 hr, or more hours.

[0234] In some embodiments, the RNA guide and Cas12i polypeptide are complexed in a complexation buffer. In some embodiments, the Cas12i polypeptide is stored in a buffer that is replaced with a complexation buffer to form a complex with the RNA guide. In some embodiments, the Cas12i polypeptide is stored in a complexation buffer.

[0235] In some embodiments, the complexation buffer has a pH in a range of about 7.3 to 8.6. In one embodiment, the pH of the complexation buffer is about 7.3. In one embodiment, the pH of the complexation buffer is about 7.4. In one embodiment, the pH of the complexation buffer is about 7.5. In one embodiment, the pH of the complexation buffer is about 7.6. In one embodiment, the pH of the complexation buffer is about 7.7. In one embodiment, the pH of the complexation buffer is about 7.8. In one embodiment, the pH of the complexation buffer is about 7.9. In one embodiment, the pH of the complexation buffer is about 8.0. In one embodiment, the pH of the complexation buffer is about 8.1. In one embodiment, the pH of the complexation buffer is about 8.2. In one embodiment, the pH of the complexation buffer is about 8.3. In one embodiment, the pH of the complexation buffer is about 8.4. In one embodiment, the pH of the complexation buffer is about 8.5. In one embodiment, the pH of the complexation buffer is about 8.6.

[0236] In some embodiments, the Cas12i polypeptide can be overexpressed and complexed with the RNA guide in a host cell prior to purification as described herein. In some embodiments, mRNA or DNA encoding the Cas12i polypeptide is introduced into a cell so that the Cas12i polypeptide is expressed in the cell. In some embodiments, the RNA guide is also introduced into the cell, whether simultaneously, separately, or sequentially from a single mRNA or DNA construct, such that the ribonucleoprotein complex is formed in the cell.

### Delivery

[0237] Compositions or complexes described herein may be formulated, for example, including a carrier, such as a carrier and/or a polymeric carrier, e.g., a liposome, and delivered by known methods to a cell (e.g., a prokaryotic, eukaryotic, plant, mammalian, etc.). Such methods include, but not limited to, transfection (e.g., lipid-mediated, cationic polymers, calcium phosphate, dendrimers); electroporation or other methods of membrane disruption (e.g., nucleofection), viral delivery (e.g., lentivirus, retrovirus, adenovirus, AAV), microinjection, microprojectile bombardment (“gene gun”), fugene, direct sonic loading, cell squeezing, optical transfection, protoplast fusion, impalefection, magnetofection, exosome-mediated transfer, lipid nanoparticle-mediated transfer, and any combination thereof.

[0238] In some embodiments, the method comprises delivering one or more nucleic acids (e.g., nucleic acids encoding the Cas12i polypeptide, RNA guide, donor DNA, etc.), one or more transcripts thereof, and/or a pre-formed RNA guide/Cas12i polypeptide complex to a cell, where a ternary complex is formed. Exemplary intracellular delivery methods, include, but are not limited to: viruses or virus-like agents; chemical-based transfection methods, such as those using calcium phosphate, dendrimers, liposomes, or cationic polymers (e.g., DEAE-dextran or polyethylenimine); non-chemical methods, such as microinjection, electroporation, cell squeezing, sonoporation, optical transfection, impalefection, protoplast fusion, bacterial conjugation, delivery of plasmids or transposons; particle-based methods, such as using a gene gun, magnectofection or magnet assisted transfection, particle bombardment; and hybrid methods, such as nucleofection. In some embodiments, the present application further provides cells produced by such methods, and organisms (such as animals, plants, or fungi) comprising or produced from such cells.

[0239] In some embodiments, the Cas12i component and the RNA guide component are delivered together. For example, in some embodiments, the Cas12i component and the RNA guide component are packaged together in a single AAV particle. In another example, in some embodiments, the Cas12i component and the RNA guide component are delivered together via lipid nanoparticles (LNPs). In some embodiments, the Cas12i component and the RNA guide component are delivered separately. For example, in some embodiments, the Cas12i component and the RNA guide are packaged into separate AAV particles. In another example, in some embodiments, the Cas12i component is delivered by a first delivery mechanism and the RNA guide is delivered by a second delivery mechanism.

### Cells

[0240] Compositions or complexes described herein can be delivered to a variety of cells. In some embodiments, the cell is an isolated cell. In some embodiments, the cell is in cell culture or a co-culture of two or more cell types. In some embodiments, the cell is ex vivo. In some embodiments, the cell is obtained from a living organism and maintained in a cell culture. In some embodiments, the cell is a single-cellular organism.

[0241] In some embodiments, the cell is a prokaryotic cell. In some embodiments, the cell is a bacterial cell or derived from a bacterial cell. In some embodiments, the cell is an archaeal cell or derived from an archaeal cell.

[0242] In some embodiments, the cell is a eukaryotic cell. In some embodiments, the cell is a plant cell or derived from a plant cell. In some embodiments, the cell is a fungal cell or derived from a fungal cell. In some embodiments, the cell is an animal cell or derived from an animal cell. In some embodiments, the cell is an invertebrate cell or derived from an invertebrate cell. In some embodiments, the cell is a vertebrate cell or derived from a vertebrate cell. In some embodiments, the cell is a mammalian cell or derived from a mammalian cell. In some embodiments, the cell is a human cell. In some embodiments, the cell is a zebra fish cell. In some embodiments, the cell is a rodent cell. In some embodiments, the cell is synthetically made, sometimes termed an artificial cell.

[0243] In some embodiments, the cell is derived from a cell line. A wide variety of cell lines for tissue culture are known in the art. Examples of cell lines include, but are not limited to, 293T, MF7, K562, HeLa, CHO, and transgenic varieties thereof. Cell lines are available from a variety of sources known to those with skill in the art (see, e.g., the American Type Culture Collection (ATCC) (Manassas, Va.)). In some embodiments, the cell is an immortal or immortalized cell.

[0244] In some embodiments, the cell is a primary cell. In some embodiments, the cell is a stem cell such as a totipotent stem cell (e.g., omnipotent), a pluripotent stem cell, a multipotent stem cell, an oligopotent stem cell, or an unipotent stem cell. In some embodiments, the cell is an induced pluripotent stem cell (iPSC) or derived from an iPSC. In some embodiments, the cell is a differentiated cell. For example, in some embodiments, the differentiated cell is a muscle cell (e.g., a myocyte), a fat cell (e.g., an adipocyte), a bone cell (e.g., an osteoblast, osteocyte, osteoclast), a blood cell (e.g., a monocyte, a lymphocyte, a neutrophil, an eosinophil, a basophil, a macrophage, a erythrocyte, or a platelet), a nerve cell (e.g., a neuron), an epithelial cell, an immune cell (e.g., a lymphocyte, a neutrophil, a monocyte, or a macrophage), a liver cell (e.g., a hepatocyte), a fibroblast, or a sex cell. In some embodiments, the cell is a terminally differentiated cell. For example, in some embodiments, the terminally differentiated cell is a neuronal cell, an adipocyte, a cardiomyocyte, a skeletal muscle cell, an epidermal cell, or a gut cell. In some embodiments, the cell is an immune cell. In some embodiments, the immune cell is a T cell. In some embodiments, the immune cell is a B cell. In some embodiments, the immune cell is a Natural Killer (NK) cell. In some embodiments, the immune cell is a Tumor Infiltrating Lymphocyte (TIL). In some embodiments, the cell is a mammalian cell, e.g., a human cell or a murine cell. In some embodiments, the murine cell is derived from a wild-type mouse, an immunosuppressed mouse, or a disease-specific mouse model. In some embodiments, the cell is a cell within a living tissue, organ, or organism.

### Methods

[0245] The disclosure also provides methods of modifying a target sequence within the BCL11A gene. In some embodiments, the methods comprise introducing a BCL11A-targeting RNA guide and a Cas12i polypeptide into a cell. The BCL11A-targeting RNA guide and Cas12i polypeptide can be introduced as a ribonucleoprotein complex into a cell. The BCL11A-targeting RNA guide and Cas12i polypeptide can be introduced on a nucleic acid vector. The Cas12i polypeptide can be introduced as an mRNA. The RNA guide can be introduced directly into the cell.

[0246] In some embodiments, the sequence of the BCL11A gene is set forth in SEQ ID NO: 2635 or the reverse complement thereof. In some embodiments, the target sequence is in an exon of a BCL11A gene, such as an exon having a sequence set forth in any one of SEQ ID NO: 2636, SEQ ID NO: 2637, SEQ ID NO: 2638, or SEQ ID NO: 2639, or a reverse complement thereof, or in an enhancer region of the BCL11A gene, such as an enhancer region having a sequence set forth in SEQ ID NO: 2640, or the reverse complement thereof. In some embodiments, the target sequence is in an intron of a BCL11A gene (e.g., an intron of the sequence set forth in SEQ ID NO: 2635 or the reverse complement thereof). In other embodiments, the sequence of the BCL11A gene is a variant of the sequence set forth in SEQ ID NO: 2635 (or the reverse complement thereof) or a homolog of the sequence set forth in SEQ ID NO: 2635 (or the reverse complement thereof). For example, in some embodiments, the target sequence is polymorphic variant of the BCL11A sequence set forth in SEQ ID NO: 2635 (or the reverse complement thereof) or a non-human form of the BCL11A gene.

[0247] In some embodiments, an RNA guide as disclosed herein is designed to be complementary to a target sequence that is adjacent to a 5′-NTTN-3′ PAM sequence. The 5′-NTTN-3′ sequence may be immediately adjacent to the target sequence or, for example, within a small number (e.g., 1, 2, 3, 4, or 5) of nucleotides of the target sequence. In some embodiments the 5′-NTTN-3′ sequence is 5′-NTTY-3′, 5′-NTTC-3′, 5′-NTTT-3′, 5′-NTTA-3′, 5′-NTTB-3′, 5′-NTTG-3′, 5′-CTTY-3′, 5‘-DTTR’3′, 5′-CTTR-3′, 5′-DTTT-3′, 5′-ATTN-3′, or 5′-GTTN-3′, wherein Y is C or T, B is any nucleotide except for A, D is any nucleotide except for C, and R is A or G. In some embodiments, the 5′-NTTN-3′ sequence is 5′-ATTA-3′, 5′-ATTT-3′, 5′-ATTG-3′, 5′-ATTC-3′, 5′-TTTA-3′, 5′-TTTT-3′, 5′-TTTG-3′, 5′-TTTC-3′, 5′-GTTA-3′, 5′-GTTT-3′, 5′-GTTG-3′, 5′-GTTC-3′, 5′-CTTA-3′, 5′-CTTT-3′, 5′-CTTG-3′, or 5′-CTTC-3′. In some embodiments, the RNA guide is designed to bind to a first strand of a double-stranded target sequence (e.g., the target strand or the spacer-complementary strand), and the 5′-NTTN-3′ PAM sequence is present in the second, complementary strand (e.g., the non-target strand or the non-spacer-complementary strand). In some embodiments, the RNA guide binds adjacent to a 5′-NAAN-3′ sequence on the target strand (e.g., the spacer-complementary strand).

[0248] In some embodiments, the Cas12i polypeptide has enzymatic activity (e.g., nuclease activity). In some embodiments, the Cas12i polypeptide induces one or more DNA double-stranded breaks in the cell. In some embodiments, the Cas12i polypeptide induces one or more DNA single-stranded breaks in the cell. In some embodiments, the Cas12i polypeptide induces one or more DNA nicks in the cell. In some embodiments, DNA breaks and/or nicks result in formation of one or more indels (e.g., one or more deletions).

[0249] In some embodiments, an RNA guide disclosed herein forms a complex with the Cas12i polypeptide and directs the Cas12i polypeptide to a target sequence adjacent to a 5′-NTTN-3′ sequence. In some embodiments, the complex induces a deletion (e.g., a nucleotide deletion or DNA deletion) adjacent to the 5′-NTTN-3′ sequence. In some embodiments, the complex induces a deletion adjacent to a 5′-ATTA-3′, 5′-ATTT-3′, 5′-ATTG-3′, 5′-ATTC-3′, 5′-TTTA-3′, 5′-TTTT-3′, 5′-TTTG-3′, 5′-TTTC-3′, 5′-GTTA-3′, 5′-GTTT-3′, 5′-GTTG-3′, 5′-GTTC-3′, 5′-CTTA-3′, 5′-CTTT-3′, 5′-CTTG-3′, or 5′-CTTC-3′ sequence. In some embodiments, the complex induces a deletion adjacent to a T/C-rich sequence.

[0250] In some embodiments, the deletion is downstream of a 5′-NTTN-3′ sequence. In some embodiments, the deletion is downstream of a 5′-ATTA-3′, 5′-ATTT-3′, 5′-ATTG-3′, 5′-ATTC-3′, 5′-TTTA-3′, 5′-TTTT-3′, 5′-TTTG-3′, 5′-TTTC-3′, 5′-GTTA-3′, 5′-GTTT-3′, 5′-GTTG-3′, 5′-GTTC-3′, 5′-CTTA-3′, 5′-CTTT-3′, 5′-CTTG-3′, or 5′-CTTC-3′ sequence. In some embodiments, the deletion is downstream of a T/C-rich sequence.

[0251] In some embodiments, the deletion alters expression of the BCL11A gene. In some embodiments, the deletion alters function of the BCL11A gene. In some embodiments, the deletion inactivates the BCL11A gene. In some embodiments, the deletion is a frameshifting deletion. In some embodiments, the deletion is a non-frameshifting deletion. In some embodiments, the deletion leads to cell toxicity or cell death (e.g., apoptosis).

[0252] In some embodiments, the deletion starts within about 5 to about 15 nucleotides (e.g., about 3, 4, 5, 6, 7, 8, 9, 10, 11, 12, 13, 14, 15, 16, or 17 nucleotides) of the 5′-NTTN-3′ sequence. In some embodiments, the deletion starts within about 5 to about 15 nucleotides (e.g., about 3, 4, 5, 6, 7, 8, 9, 10, 11, 12, 13, 14, 15, 16, or 17 nucleotides) of a 5′-ATTA-3′, 5′-ATTT-3′, 5′-ATTG-3′, 5′-ATTC-3′, 5′-TTTA-3′, 5′-TTTT-3′, 5′-TTTG-3′, 5′-TTTC-3′, 5′-GTTA-3′, 5′-GTTT-3′, 5′-GTTG-3′, 5′-GTTC-3′, 5′-CTTA-3′, 5′-CTTT-3′, 5′-CTTG-3′, or 5′-CTTC-3′ sequence. In some embodiments, the deletion starts within about 5 to about 15 nucleotides (e.g., about 3, 4, 5, 6, 7, 8, 9, 10, 11, 12, 13, 14, 15, 16, or 17 nucleotides) of a T/C-rich sequence.

[0253] In some embodiments, the deletion starts within about 5 to about 15 nucleotides (e.g., about 3, 4, 5, 6, 7, 8, 9, 10, 11, 12, 13, 14, 15, 16, or 17 nucleotides) downstream of the 5′-NTTN-3′ sequence. In some embodiments, the deletion starts within about 5 to about 15 nucleotides (e.g., about 3, 4, 5, 6, 7, 8, 9, 10, 11, 12, 13, 14, 15, 16, or 17 nucleotides) downstream of a 5′-ATTA-3′, 5′-ATTT-3′, 5′-ATTG-3′, 5′-ATTC-3′, 5′-TTTA-3′, 5′-TTTT-3′, 5′-TTTG-3′, 5′-TTTC-3′, 5′-GTTA-3′, 5′-GTTT-3′, 5′-GTTG-3′, 5′-GTTC-3′, 5′-CTTA-3′, 5′-CTTT-3′, 5′-CTTG-3′, or 5′-CTTC-3′ sequence. In some embodiments, the deletion starts within about 5 to about 15 nucleotides (e.g., about 3, 4, 5, 6, 7, 8, 9, 10, 11, 12, 13, 14, 15, 16, or 17 nucleotides) downstream of a T/C-rich sequence.

[0254] In some embodiments, the deletion starts within about 5 to about 10 nucleotides (e.g., about 3, 4, 5, 6, 7, 8, 9, 10, 11, or 12 nucleotides) of the 5′-NTTN-3′ sequence. In some embodiments, the deletion starts within about 5 to about 10 nucleotides (e.g., about 3, 4, 5, 6, 7, 8, 9, 10, 11, or 12 nucleotides) of a 5′-ATTA-3′, 5′-ATTT-3′, 5′-ATTG-3′, 5′-ATTC-3′, 5′-TTTA-3′, 5′-TTTT-3′, 5′-TTTG-3′, 5′-TTTC-3′, 5′-GTTA-3′, 5′-GTTT-3′, 5′-GTTG-3′, 5′-GTTC-3′, 5′-CTTA-3′, 5′-CTTT-3′, 5′-CTTG-3′, or 5′-CTTC-3′ sequence. In some embodiments, the deletion starts within about 5 to about 10 nucleotides (e.g., about 3, 4, 5, 6, 7, 8, 9, 10, 11, or 12 nucleotides) of a T/C-rich sequence.

[0255] In some embodiments, the deletion starts within about 5 to about 10 nucleotides (e.g., about 3, 4, 5, 6, 7, 8, 9, 10, 11, or 12 nucleotides) downstream of the 5′-NTTN-3′ sequence. In some embodiments, the deletion starts within about 5 to about 10 nucleotides (e.g., about 3, 4, 5, 6, 7, 8, 9, 10, 11, or 12 nucleotides) downstream of a 5′-ATTA-3′, 5′-ATTT-3′, 5′-ATTG-3′, 5′-ATTC-3′, 5′-TTTA-3′, 5′-TTTT-3′, 5′-TTTG-3′, 5′-TTTC-3′, 5′-GTTA-3′, 5′-GTTT-3′, 5′-GTTG-3′, 5′-GTTC-3′, 5′-CTTA-3′, 5′-CTTT-3′, 5′-CTTG-3′, or 5′-CTTC-3′ sequence. In some embodiments, the deletion starts within about 5 to about 10 nucleotides (e.g., about 3, 4, 5, 6, 7, 8, 9, 10, 11, or 12 nucleotides) downstream of a T/C-rich sequence.

[0256] In some embodiments, the deletion starts within about 10 to about 15 nucleotides (e.g., about 8, 9, 10, 11, 12, 13, 14, 15, 16, or 17 nucleotides) of the 5′-NTTN-3′ sequence. In some embodiments, the deletion starts within about 10 to about 15 nucleotides (e.g., about 8, 9, 10, 11, 12, 13, 14, 15, 16, or 17 nucleotides) of a 5′-ATTA-3′, 5′-ATTT-3′, 5′-ATTG-3′, 5′-ATTC-3′, 5′-TTTA-3′, 5′-TTTT-3′, 5′-TTTG-3′, 5′-TTTC-3′, 5′-GTTA-3′, 5′-GTTT-3′, 5′-GTTG-3′, 5′-GTTC-3′, 5′-CTTA-3′, 5′-CTTT-3′, 5′-CTTG-3′, or 5′-CTTC-3′ sequence. In some embodiments, the deletion starts within about 10 to about 15 nucleotides (e.g., about 8, 9, 10, 11, 12, 13, 14, 15, 16, or 17 nucleotides) of a T/C-rich sequence.

[0257] In some embodiments, the deletion starts within about 10 to about 15 nucleotides (e.g., about 8, 9, 10, 11, 12, 13, 14, 15, 16, or 17 nucleotides) downstream of the 5′-NTTN-3′ sequence. In some embodiments, the deletion starts within about 10 to about 15 nucleotides (e.g., about 8, 9, 10, 11, 12, 13, 14, 15, 16, or 17 nucleotides) downstream of a 5′-ATTA-3′, 5′-ATTT-3′, 5′-ATTG-3′, 5′-ATTC-3′, 5′-TTTA-3′, 5′-TTTT-3′, 5′-TTTG-3′, 5′-TTTC-3′, 5′-GTTA-3′, 5′-GTTT-3′, 5′-GTTG-3′, 5′-GTTC-3′, 5′-CTTA-3′, 5′-CTTT-3′, 5′-CTTG-3′, or 5′-CTTC-3′ sequence. In some embodiments, the deletion starts within about 10 to about 15 nucleotides (e.g., about 8, 9, 10, 11, 12, 13, 14, 15, 16, or 17 nucleotides) downstream of a T/C-rich sequence.

[0258] In some embodiments, the deletion ends within about 20 to about 30 nucleotides (e.g., about 17, 18, 19, 20, 21, 22, 23, 24, 25, 26, 27, 28, 29, 30, 31, 32, or 33 nucleotides) of the 5′-NTTN-3′ sequence. In some embodiments, the deletion ends within about 20 to about 30 nucleotides (e.g., about 17, 18, 19, 20, 21, 22, 23, 24, 25, 26, 27, 28, 29, 30, 31, 32, or 33 nucleotides) of a 5′-ATTA-3′, 5′-ATTT-3′, 5′-ATTG-3′, 5′-ATTC-3′, 5′-TTTA-3′, 5′-TTTT-3′, 5′-TTTG-3′, 5′-TTTC-3′, 5′-GTTA-3′, 5′-GTTT-3′, 5′-GTTG-3′, 5′-GTTC-3′, 5′-CTTA-3′, 5′-CTTT-3′, 5′-CTTG-3′, or 5′-CTTC-3′ sequence. In some embodiments, the deletion ends within about 20 to about 30 nucleotides (e.g., about 17, 18, 19, 20, 21, 22, 23, 24, 25, 26, 27, 28, 29, 30, 31, 32, or 33 nucleotides) of a T/C-rich sequence.

[0259] In some embodiments, the deletion ends within about 20 to about 30 nucleotides (e.g., about 17, 18, 19, 20, 21, 22, 23, 24, 25, 26, 27, 28, 29, 30, 31, 32, or 33 nucleotides) downstream of the 5′-NTTN-3′ sequence. In some embodiments, the deletion ends within about 20 to about 30 nucleotides (e.g., about 17, 18, 19, 20, 21, 22, 23, 24, 25, 26, 27, 28, 29, 30, 31, 32, or 33 nucleotides) downstream of a 5′-ATTA-3′, 5′-ATTT-3′, 5′-ATTG-3′, 5′-ATTC-3′, 5′-TTTA-3′, 5′-TTTT-3′, 5′-TTTG-3′, 5′-TTTC-3′, 5′-GTTA-3′, 5′-GTTT-3′, 5′-GTTG-3′, 5′-GTTC-3′, 5′-CTTA-3′, 5′-CTTT-3′, 5′-CTTG-3′, or 5′-CTTC-3′ sequence. In some embodiments, the deletion ends within about 20 to about 30 nucleotides (e.g., about 17, 18, 19, 20, 21, 22, 23, 24, 25, 26, 27, 28, 29, 30, 31, 32, or 33 nucleotides) downstream of a T/C-rich sequence.

[0260] In some embodiments, the deletion ends within about 20 to about 25 nucleotides (e.g., about 17, 18, 19, 20, 21, 22, 23, 24, 25, 26, 27, or 28 nucleotides) of the 5′-NTTN-3′ sequence. In some embodiments, the deletion ends within about 20 to about 25 nucleotides (e.g., about 17, 18, 19, 20, 21, 22, 23, 24, 25, 26, 27, or 28 nucleotides) of a 5′-ATTA-3′, 5′-ATTT-3′, 5′-ATTG-3′, 5′-ATTC-3′, 5′-TTTA-3′, 5′-TTTT-3′, 5′-TTTG-3′, 5′-TTTC-3′, 5′-GTTA-3′, 5′-GTTT-3′, 5′-GTTG-3′, 5′-GTTC-3′, 5′-CTTA-3′, 5′-CTTT-3′, 5′-CTTG-3′, or 5′-CTTC-3′ sequence. In some embodiments, the deletion ends within about 20 to about 25 nucleotides (e.g., about 17, 18, 19, 20, 21, 22, 23, 24, 25, 26, 27, or 28 nucleotides) of a T/C-rich sequence.

[0261] In some embodiments, the deletion ends within about 20 to about 25 nucleotides (e.g., about 17, 18, 19, 20, 21, 22, 23, 24, 25, 26, 27, or 28 nucleotides) downstream of the 5′-NTTN-3′ sequence. In some embodiments, the deletion ends within about 20 to about 25 nucleotides (e.g., about 17, 18, 19, 20, 21, 22, 23, 24, 25, 26, 27, or 28 nucleotides) downstream of a 5′-ATTA-3′, 5′-ATTT-3′, 5′-ATTG-3′, 5′-ATTC-3′, 5′-TTTA-3′, 5′-TTTT-3′, 5′-TTTG-3′, 5′-TTTC-3′, 5′-GTTA-3′, 5′-GTTT-3′, 5′-GTTG-3′, 5′-GTTC-3′, 5′-CTTA-3′, 5′-CTTT-3′, 5′-CTTG-3′, or 5′-CTTC-3′ sequence. In some embodiments, the deletion ends within about 20 to about 25 nucleotides (e.g., about 17, 18, 19, 20, 21, 22, 23, 24, 25, 26, 27, or 28 nucleotides) downstream of a T/C-rich sequence.

[0262] In some embodiments, the deletion ends within about 25 to about 30 nucleotides (e.g., about 22, 23, 24, 25, 26, 27, 28, 29, 30, 31, 32, or 33 nucleotides) of the 5′-NTTN-3′ sequence. In some embodiments, the deletion ends within about 25 to about 30 nucleotides (e.g., about 22, 23, 24, 25, 26, 27, 28, 29, 30, 31, 32, or 33 nucleotides) of a 5′-ATTA-3′, 5′-ATTT-3′, 5′-ATTG-3′, 5′-ATTC-3′, 5′-TTTA-3′, 5′-TTTT-3′, 5′-TTTG-3′, 5′-TTTC-3′, 5′-GTTA-3′, 5′-GTTT-3′, 5′-GTTG-3′, 5′-GTTC-3′, 5′-CTTA-3′, 5′-CTTT-3′, 5′-CTTG-3′, or 5′-CTTC-3′ sequence. In some embodiments, the deletion ends within about 25 to about 30 nucleotides (e.g., about 22, 23, 24, 25, 26, 27, 28, 29, 30, 31, 32, or 33 nucleotides) of a T/C-rich sequence.

[0263] In some embodiments, the deletion ends within about 25 to about 30 nucleotides (e.g., about 22, 23, 24, 25, 26, 27, 28, 29, 30, 31, 32, or 33 nucleotides) downstream of the 5′-NTTN-3′ sequence. In some embodiments, the deletion ends within about 25 to about 30 nucleotides (e.g., about 22, 23, 24, 25, 26, 27, 28, 29, 30, 31, 32, or 33 nucleotides) downstream of a 5′-ATTA-3′, 5′-ATTT-3′, 5′-ATTG-3′, 5′-ATTC-3′, 5′-TTTA-3′, 5′-TTTT-3′, 5′-TTTG-3′, 5′-TTTC-3′, 5′-GTTA-3′, 5′-GTTT-3′, 5′-GTTG-3′, 5′-GTTC-3′, 5′-CTTA-3′, 5′-CTTT-3′, 5′-CTTG-3′, or 5′-CTTC-3′ sequence. In some embodiments, the deletion ends within about 25 to about 30 nucleotides (e.g., about 22, 23, 24, 25, 26, 27, 28, 29, 30, 31, 32, or 33 nucleotides) downstream of a T/C-rich sequence.

[0264] In some embodiments, the deletion starts within about 5 to about 15 nucleotides (e.g., about 3, 4, 5, 6, 7, 8, 9, 10, 11, 12, 13, 14, 15, 16, or 17 nucleotides) and ends within about 20 to about 30 nucleotides (e.g., about 17, 18, 19, 20, 21, 22, 23, 24, 25, 26, 27, 28, 29, 30, 31, 32, or 33 nucleotides) of the 5′-NTTN-3′ sequence. In some embodiments, the deletion starts within about 5 to about 15 nucleotides (e.g., about 3, 4, 5, 6, 7, 8, 9, 10, 11, 12, 13, 14, 15, 16, or 17 nucleotides) and ends within about 20 to about 30 nucleotides (e.g., about 17, 18, 19, 20, 21, 22, 23, 24, 25, 26, 27, 28, 29, 30, 31, 32, or 33 nucleotides) of a 5′-ATTA-3′, 5′-ATTT-3′, 5′-ATTG-3′, 5′-ATTC-3′, 5′-TTTA-3′, 5′-TTTT-3′, 5′-TTTG-3′, 5′-TTTC-3′, 5′-GTTA-3′, 5′-GTTT-3′, 5′-GTTG-3′, 5′-GTTC-3′, 5′-CTTA-3′, 5′-CTTT-3′, 5′-CTTG-3′, or 5′-CTTC-3′ sequence. In some embodiments, the deletion starts within about 5 to about 15 nucleotides (e.g., about 3, 4, 5, 6, 7, 8, 9, 10, 11, 12, 13, 14, 15, 16, or 17 nucleotides) and ends within about 20 to about 30 nucleotides (e.g., about 17, 18, 19, 20, 21, 22, 23, 24, 25, 26, 27, 28, 29, 30, 31, 32, or 33 nucleotides) of a T/C-rich sequence.

[0265] In some embodiments, the deletion starts within about 5 to about 15 nucleotides (e.g., about 3, 4, 5, 6, 7, 8, 9, 10, 11, 12, 13, 14, 15, 16, or 17 nucleotides) downstream of the 5′-NTTN-3′ sequence and ends within about 20 to about 30 nucleotides (e.g., about 17, 18, 19, 20, 21, 22, 23, 24, 25, 26, 27, 28, 29, 30, 31, 32, or 33 nucleotides) downstream of the 5′-NTTN-3′ sequence. In some embodiments, the deletion starts within about 5 to about 15 nucleotides (e.g., about 3, 4, 5, 6, 7, 8, 9, 10, 11, 12, 13, 14, 15, 16, or 17 nucleotides) downstream of a 5′-ATTA-3′, 5′-ATTT-3′, 5′-ATTG-3′, 5′-ATTC-3′, 5′-TTTA-3′, 5′-TTTT-3′, 5′-TTTG-3′, 5′-TTTC-3′, 5′-GTTA-3′, 5′-GTTT-3′, 5′-GTTG-3′, 5′-GTTC-3′, 5′-CTTA-3′, 5′-CTTT-3′, 5′-CTTG-3′, or 5′-CTTC-3′ sequence and ends within about 20 to about 30 nucleotides (e.g., about 17, 18, 19, 20, 21, 22, 23, 24, 25, 26, 27, 28, 29, 30, 31, 32, or 33 nucleotides) downstream of the 5′-ATTA-3′, 5′-ATTT-3′, 5′-ATTG-3′, 5′-ATTC-3′, 5′-TTTA-3′, 5′-TTTT-3′, 5′-TTTG-3′, 5′-TTTC-3′, 5′-GTTA-3′, 5′-GTTT-3′, 5′-GTTG-3′, 5′-GTTC-3′, 5′-CTTA-3′, 5′-CTTT-3′, 5′-CTTG-3′, or 5′-CTTC-3′ sequence. In some embodiments, the deletion starts within about 5 to about 15 nucleotides (e.g., about 3, 4, 5, 6, 7, 8, 9, 10, 11, 12, 13, 14, 15, 16, or 17 nucleotides) downstream of a T/C-rich sequence and ends within about 20 to about 30 nucleotides (e.g., about 17, 18, 19, 20, 21, 22, 23, 24, 25, 26, 27, 28, 29, 30, 31, 32, or 33 nucleotides) downstream of the T/C-rich sequence.

[0266] In some embodiments, the deletion starts within about 5 to about 15 nucleotides (e.g., about 3, 4, 5, 6, 7, 8, 9, 10, 11, 12, 13, 14, 15, 16, or 17 nucleotides) and ends within about 20 to about 25 nucleotides (e.g., about 17, 18, 19, 20, 21, 22, 23, 24, 25, 26, 27, or 28 nucleotides) of the 5′-NTTN-3′ sequence. In some embodiments, the deletion starts within about 5 to about 15 nucleotides (e.g., about 3, 4, 5, 6, 7, 8, 9, 10, 11, 12, 13, 14, 15, 16, or 17 nucleotides) and ends within about 20 to about 25 nucleotides (e.g., about 17, 18, 19, 20, 21, 22, 23, 24, 25, 26, 27, or 28 nucleotides) of a 5′-ATTA-3′, 5′-ATTT-3′, 5′-ATTG-3′, 5′-ATTC-3′, 5′-TTTA-3′, 5′-TTTT-3′, 5′-TTTG-3′, 5′-TTTC-3′, 5′-GTTA-3′, 5′-GTTT-3′, 5′-GTTG-3′, 5′-GTTC-3′, 5′-CTTA-3′, 5′-CTTT-3′, 5′-CTTG-3′, or 5′-CTTC-3′ sequence. In some embodiments, the deletion starts within about 5 to about 15 nucleotides (e.g., about 3, 4, 5, 6, 7, 8, 9, 10, 11, 12, 13, 14, 15, 16, or 17 nucleotides) and ends within about 20 to about 25 nucleotides (e.g., about 17, 18, 19, 20, 21, 22, 23, 24, 25, 26, 27, or 28 nucleotides) of a T/C-rich sequence.

[0267] In some embodiments, the deletion starts within about 5 to about 15 nucleotides (e.g., about 3, 4, 5, 6, 7, 8, 9, 10, 11, 12, 13, 14, 15, 16, or 17 nucleotides) downstream of the 5′-NTTN-3′ sequence and ends within about 20 to about 25 nucleotides (e.g., about 17, 18, 19, 20, 21, 22, 23, 24, 25, 26, 27, or 28 nucleotides) downstream of the 5′-NTTN-3′ sequence. In some embodiments, the deletion starts within about 5 to about 15 nucleotides (e.g., about 3, 4, 5, 6, 7, 8, 9, 10, 11, 12, 13, 14, 15, 16, or 17 nucleotides) downstream of a 5′-ATTA-3′, 5′-ATTT-3′, 5′-ATTG-3′, 5′-ATTC-3′, 5′-TTTA-3′, 5′-TTTT-3′, 5′-TTTG-3′, 5′-TTTC-3′, 5′-GTTA-3′, 5′-GTTT-3′, 5′-GTTG-3′, 5′-GTTC-3′, 5′-CTTA-3′, 5′-CTTT-3′, 5′-CTTG-3′, or 5′-CTTC-3′ sequence and ends within about 20 to about 25 nucleotides (e.g., about 17, 18, 19, 20, 21, 22, 23, 24, 25, 26, 27, or 28 nucleotides) downstream of the 5′-ATTA-3′, 5′-ATTT-3′, 5′-ATTG-3′, 5′-ATTC-3′, 5′-TTTA-3′, 5′-TTTT-3′, 5′-TTTG-3′, 5′-TTTC-3′, 5′-GTTA-3′, 5′-GTTT-3′, 5′-GTTG-3′, 5′-GTTC-3′, 5′-CTTA-3′, 5′-CTTT-3′, 5′-CTTG-3′, or 5′-CTTC-3′ sequence. In some embodiments, the deletion starts within about 5 to about 15 nucleotides (e.g., about 3, 4, 5, 6, 7, 8, 9, 10, 11, 12, 13, 14, 15, 16, or 17 nucleotides) downstream of a T/C-rich sequence and ends within about 20 to about 25 nucleotides (e.g., about 17, 18, 19, 20, 21, 22, 23, 24, 25, 26, 27, or 28 nucleotides) downstream of the T/C-rich sequence.

[0268] In some embodiments, the deletion starts within about 5 to about 15 nucleotides (e.g., about 3, 4, 5, 6, 7, 8, 9, 10, 11, 12, 13, 14, 15, 16, or 17 nucleotides) and ends within about 25 to about 30 nucleotides (e.g., about 22, 23, 24, 25, 26, 27, 28, 29, 30, 31, 32, or 33 nucleotides) of the 5′-NTTN-3′ sequence. In some embodiments, the deletion starts within about 5 to about 15 nucleotides (e.g., about 3, 4, 5, 6, 7, 8, 9, 10, 11, 12, 13, 14, 15, 16, or 17 nucleotides) and ends within about 25 to about 30 nucleotides (e.g., about 22, 23, 24, 25, 26, 27, 28, 29, 30, 31, 32, or 33 nucleotides) of a 5′-ATTA-3′, 5′-ATTT-3′, 5′-ATTG-3′, 5′-ATTC-3′, 5′-TTTA-3′, 5′-TTTT-3′, 5′-TTTG-3′, 5′-TTTC-3′, 5′-GTTA-3′, 5′-GTTT-3′, 5′-GTTG-3′, 5′-GTTC-3′, 5′-CTTA-3′, 5′-CTTT-3′, 5′-CTTG-3′, or 5′-CTTC-3′ sequence. In some embodiments, the deletion starts within about 5 to about 15 nucleotides (e.g., about 3, 4, 5, 6, 7, 8, 9, 10, 11, 12, 13, 14, 15, 16, or 17 nucleotides) and ends within about 25 to about 30 nucleotides (e.g., about 22, 23, 24, 25, 26, 27, 28, 29, 30, 31, 32, or 33 nucleotides) of a T/C-rich sequence.

[0269] In some embodiments, the deletion starts within about 5 to about 15 nucleotides (e.g., about 3, 4, 5, 6, 7, 8, 9, 10, 11, 12, 13, 14, 15, 16, or 17 nucleotides) downstream of the 5′-NTTN-3′ sequence and ends within about 25 to about 30 nucleotides (e.g., about 22, 23, 24, 25, 26, 27, 28, 29, 30, 31, 32, or 33 nucleotides) downstream of the 5′-NTTN-3′ sequence. In some embodiments, the deletion starts within about 5 to about 15 nucleotides (e.g., about 3, 4, 5, 6, 7, 8, 9, 10, 11, 12, 13, 14, 15, 16, or 17 nucleotides) downstream of a 5′-ATTA-3′, 5′-ATTT-3′, 5′-ATTG-3′, 5′-ATTC-3′, 5′-TTTA-3′, 5′-TTTT-3′, 5′-TTTG-3′, 5′-TTTC-3′, 5′-GTTA-3′, 5′-GTTT-3′, 5′-GTTG-3′, 5′-GTTC-3′, 5′-CTTA-3′, 5′-CTTT-3′, 5′-CTTG-3′, or 5′-CTTC-3′ sequence and ends within about 25 to about 30 nucleotides (e.g., about 22, 23, 24, 25, 26, 27, 28, 29, 30, 31, 32, or 33 nucleotides) downstream of the 5′-ATTA-3′, 5′-ATTT-3′, 5′-ATTG-3′, 5′-ATTC-3′, 5′-TTTA-3′, 5′-TTTT-3′, 5′-TTTG-3′, 5′-TTTC-3′, 5′-GTTA-3′, 5′-GTTT-3′, 5′-GTTG-3′, 5′-GTTC-3′, 5′-CTTA-3′, 5′-CTTT-3′, 5′-CTTG-3′, or 5′-CTTC-3′ sequence. In some embodiments, the deletion starts within about 5 to about 15 nucleotides (e.g., about 3, 4, 5, 6, 7, 8, 9, 10, 11, 12, 13, 14, 15, 16, or 17 nucleotides) downstream of a T/C-rich sequence and ends within about 25 to about 30 nucleotides (e.g., about 22, 23, 24, 25, 26, 27, 28, 29, 30, 31, 32, or 33 nucleotides) downstream of the T/C-rich sequence.

[0270] In some embodiments, the deletion starts within about 5 to about 10 nucleotides (e.g., about 3, 4, 5, 6, 7, 8, 9, 10, 11, or 12 nucleotides) and ends within about 20 to about 30 nucleotides (e.g., about 17, 18, 19, 20, 21, 22, 23, 24, 25, 26, 27, 28, 29, 30, 31, 32, or 33 nucleotides) of the 5′-NTTN-3′ sequence. In some embodiments, the deletion starts within about 5 to about 10 nucleotides (e.g., about 3, 4, 5, 6, 7, 8, 9, 10, 11, or 12 nucleotides) and ends within about 20 to about 30 nucleotides (e.g., about 17, 18, 19, 20, 21, 22, 23, 24, 25, 26, 27, 28, 29, 30, 31, 32, or 33 nucleotides) of a 5′-ATTA-3′, 5′-ATTT-3′, 5′-ATTG-3′, 5′-ATTC-3′, 5′-TTTA-3′, 5′-TTTT-3′, 5′-TTTG-3′, 5′-TTTC-3′, 5′-GTTA-3′, 5′-GTTT-3′, 5′-GTTG-3′, 5′-GTTC-3′, 5′-CTTA-3′, 5′-CTTT-3′, 5′-CTTG-3′, or 5′-CTTC-3′ sequence. In some embodiments, the deletion starts within about 5 to about 10 nucleotides (e.g., about 3, 4, 5, 6, 7, 8, 9, 10, 11, or 12 nucleotides) and ends within about 20 to about 30 nucleotides (e.g., about 17, 18, 19, 20, 21, 22, 23, 24, 25, 26, 27, 28, 29, 30, 31, 32, or 33 nucleotides) of a T/C-rich sequence.

[0271] In some embodiments, the deletion starts within about 5 to about 10 nucleotides (e.g., about 3, 4, 5, 6, 7, 8, 9, 10, 11, or 12 nucleotides) downstream of the 5′-NTTN-3′ sequence and ends within about 20 to about 30 nucleotides (e.g., about 17, 18, 19, 20, 21, 22, 23, 24, 25, 26, 27, 28, 29, 30, 31, 32, or 33 nucleotides) downstream of the 5′-NTTN-3′ sequence. In some embodiments, the deletion starts within about 5 to about 10 nucleotides (e.g., about 3, 4, 5, 6, 7, 8, 9, 10, 11, or 12 nucleotides) downstream of a 5′-ATTA-3′, 5′-ATTT-3′, 5′-ATTG-3′, 5′-ATTC-3′, 5′-TTTA-3′, 5′-TTTT-3′, 5′-TTTG-3′, 5′-TTTC-3′, 5′-GTTA-3′, 5′-GTTT-3′, 5′-GTTG-3′, 5′-GTTC-3′, 5′-CTTA-3′, 5′-CTTT-3′, 5′-CTTG-3′, or 5′-CTTC-3′ sequence and ends within about 20 to about 30 nucleotides (e.g., about 17, 18, 19, 20, 21, 22, 23, 24, 25, 26, 27, 28, 29, 30, 31, 32, or 33 nucleotides) downstream of the 5′-ATTA-3′, 5′-ATTT-3′, 5′-ATTG-3′, 5′-ATTC-3′, 5′-TTTA-3′, 5′-TTTT-3′, 5′-TTTG-3′, 5′-TTTC-3′, 5′-GTTA-3′, 5′-GTTT-3′, 5′-GTTG-3′, 5′-GTTC-3′, 5′-CTTA-3′, 5′-CTTT-3′, 5′-CTTG-3′, or 5′-CTTC-3′ sequence. In some embodiments, the deletion starts within about 5 to about 10 nucleotides (e.g., about 3, 4, 5, 6, 7, 8, 9, 10, 11, or 12 nucleotides) downstream of a T/C-rich sequence and ends within about 20 to about 30 nucleotides (e.g., about 17, 18, 19, 20, 21, 22, 23, 24, 25, 26, 27, 28, 29, 30, 31, 32, or 33 nucleotides) downstream of the T/C-rich sequence.

[0272] In some embodiments, the deletion starts within about 5 to about 10 nucleotides (e.g., about 3, 4, 5, 6, 7, 8, 9, 10, 11, or 12 nucleotides) and ends within about 20 to about 25 nucleotides (e.g., about 17, 18, 19, 20, 21, 22, 23, 24, 25, 26, 27, or 28 nucleotides) of the 5′-NTTN-3′ sequence. In some embodiments, the deletion starts within about 5 to about 10 nucleotides (e.g., about 3, 4, 5, 6, 7, 8, 9, 10, 11, or 12 nucleotides) and ends within about 20 to about 25 nucleotides (e.g., about 17, 18, 19, 20, 21, 22, 23, 24, 25, 26, 27, or 28 nucleotides) of a 5′-ATTA-3′, 5′-ATTT-3′, 5′-ATTG-3′, 5′-ATTC-3′, 5′-TTTA-3′, 5′-TTTT-3′, 5′-TTTG-3′, 5′-TTTC-3′, 5′-GTTA-3′, 5′-GTTT-3′, 5′-GTTG-3′, 5′-GTTC-3′, 5′-CTTA-3′, 5′-CTTT-3′, 5′-CTTG-3′, or 5′-CTTC-3′ sequence. In some embodiments, the deletion starts within about 5 to about 10 nucleotides and ends within about 20 to about 25 nucleotides (e.g., about 17, 18, 19, 20, 21, 22, 23, 24, 25, 26, 27, or 28 nucleotides) (e.g., about 3, 4, 5, 6, 7, 8, 9, 10, 11, or 12 nucleotides) of a T/C-rich sequence.

[0273] In some embodiments, the deletion starts within about 5 to about 10 nucleotides (e.g., about 3, 4, 5, 6, 7, 8, 9, 10, 11, or 12 nucleotides) downstream of the 5′-NTTN-3′ sequence and ends within about 20 to about 25 nucleotides (e.g., about 17, 18, 19, 20, 21, 22, 23, 24, 25, 26, 27, or 28 nucleotides) downstream of the 5′-NTTN-3′ sequence. In some embodiments, the deletion starts within about 5 to about 10 nucleotides (e.g., about 3, 4, 5, 6, 7, 8, 9, 10, 11, or 12 nucleotides) downstream of a 5′-ATTA-3′, 5′-ATTT-3′, 5′-ATTG-3′, 5′-ATTC-3′, 5′-TTTA-3′, 5′-TTTT-3′, 5′-TTTG-3′, 5′-TTTC-3′, 5′-GTTA-3′, 5′-GTTT-3′, 5′-GTTG-3′, 5′-GTTC-3′, 5′-CTTA-3′, 5′-CTTT-3′, 5′-CTTG-3′, or 5′-CTTC-3′ sequence and ends within about 20 to about 25 nucleotides (e.g., about 17, 18, 19, 20, 21, 22, 23, 24, 25, 26, 27, or 28 nucleotides) downstream of the 5′-ATTA-3′, 5′-ATTT-3′, 5′-ATTG-3′, 5′-ATTC-3′, 5′-TTTA-3′, 5′-TTTT-3′, 5′-TTTG-3′, 5′-TTTC-3′, 5′-GTTA-3′, 5′-GTTT-3′, 5′-GTTG-3′, 5′-GTTC-3′, 5′-CTTA-3′, 5′-CTTT-3′, 5′-CTTG-3′, or 5′-CTTC-3′ sequence. In some embodiments, the deletion starts within about 5 to about 10 nucleotides (e.g., about 3, 4, 5, 6, 7, 8, 9, 10, 11, or 12 nucleotides) downstream of a T/C-rich sequence and ends within about 20 to about 25 nucleotides (e.g., about 17, 18, 19, 20, 21, 22, 23, 24, 25, 26, 27, or 28 nucleotides) downstream of the T/C-rich sequence.

[0274] In some embodiments, the deletion starts within about 5 to about 10 nucleotides (e.g., about 3, 4, 5, 6, 7, 8, 9, 10, 11, or 12 nucleotides) and ends within about 25 to about 30 nucleotides (e.g., about 22, 23, 24, 25, 26, 27, 28, 29, 30, 31, 32, or 33 nucleotides) of the 5′-NTTN-3′ sequence. In some embodiments, the deletion starts within about 5 to about 10 nucleotides (e.g., about 3, 4, 5, 6, 7, 8, 9, 10, 11, or 12 nucleotides) and ends within about 25 to about 30 nucleotides (e.g., about 22, 23, 24, 25, 26, 27, 28, 29, 30, 31, 32, or 33 nucleotides) of a T/C-rich sequence.

[0275] In some embodiments, the deletion starts within about 5 to about 10 nucleotides (e.g., about 3, 4, 5, 6, 7, 8, 9, 10, 11, or 12 nucleotides) downstream of the 5′-NTTN-3′ sequence and ends within about 25 to about 30 nucleotides (e.g., about 22, 23, 24, 25, 26, 27, 28, 29, 30, 31, 32, or 33 nucleotides) downstream of the 5′-NTTN-3′ sequence. In some embodiments, the deletion starts within about 5 to about 10 nucleotides (e.g., about 3, 4, 5, 6, 7, 8, 9, 10, 11, or 12 nucleotides) downstream of a 5′-ATTA-3′, 5′-ATTT-3′, 5′-ATTG-3′, 5′-ATTC-3′, 5′-TTTA-3′, 5′-TTTT-3′, 5′-TTTG-3′, 5′-TTTC-3′, 5′-GTTA-3′, 5′-GTTT-3′, 5′-GTTG-3′, 5′-GTTC-3′, 5′-CTTA-3′, 5′-CTTT-3′, 5′-CTTG-3′, or 5′-CTTC-3′ sequence and ends within about 25 to about 30 nucleotides (e.g., about 22, 23, 24, 25, 26, 27, 28, 29, 30, 31, 32, or 33 nucleotides) downstream of the 5′-ATTA-3′, 5′-ATTT-3′, 5′-ATTG-3′, 5′-ATTC-3′, 5′-TTTA-3′, 5′-TTTT-3′, 5′-TTTG-3′, 5′-TTTC-3′, 5′-GTTA-3′, 5′-GTTT-3′, 5′-GTTG-3′, 5′-GTTC-3′, 5′-CTTA-3′, 5′-CTTT-3′, 5′-CTTG-3′, or 5′-CTTC-3′ sequence. In some embodiments, the deletion starts within about 5 to about 10 nucleotides (e.g., about 3, 4, 5, 6, 7, 8, 9, 10, 11, or 12 nucleotides) downstream of a T/C-rich sequence and ends within about 25 to about 30 nucleotides (e.g., about 22, 23, 24, 25, 26, 27, 28, 29, 30, 31, 32, or 33 nucleotides) downstream of the T/C-rich sequence.

[0276] In some embodiments, the deletion starts within about 10 to about 15 nucleotides (e.g., about 8, 9, 10, 11, 12, 13, 14, 15, 16, or 17 nucleotides) and ends within about 20 to about 30 nucleotides (e.g., about 17, 18, 19, 20, 21, 22, 23, 24, 25, 26, 27, 28, 29, 30, 31, 32, or 33 nucleotides) of the 5′-NTTN-3′ sequence. In some embodiments, the deletion starts within about 10 to about 15 nucleotides (e.g., about 8, 9, 10, 11, 12, 13, 14, 15, 16, or 17 nucleotides) and ends within about 20 to about 30 nucleotides (e.g., about 17, 18, 19, 20, 21, 22, 23, 24, 25, 26, 27, 28, 29, 30, 31, 32, or 33 nucleotides) of a 5′-ATTA-3′, 5′-ATTT-3′, 5′-ATTG-3′, 5′-ATTC-3′, 5′-TTTA-3′, 5′-TTTT-3′, 5′-TTTG-3′, 5′-TTTC-3′, 5′-GTTA-3′, 5′-GTTT-3′, 5′-GTTG-3′, 5′-GTTC-3′, 5′-CTTA-3′, 5′-CTTT-3′, 5′-CTTG-3′, or 5′-CTTC-3′ sequence. In some embodiments, the deletion starts within about 10 to about 15 nucleotides (e.g., about 8, 9, 10, 11, 12, 13, 14, 15, 16, or 17 nucleotides) and ends within about 20 to about 30 nucleotides (e.g., about 17, 18, 19, 20, 21, 22, 23, 24, 25, 26, 27, 28, 29, 30, 31, 32, or 33 nucleotides) of a T/C-rich sequence.

[0277] In some embodiments, the deletion starts within about 10 to about 15 nucleotides (e.g., about 8, 9, 10, 11, 12, 13, 14, 15, 16, or 17 nucleotides) downstream of the 5′-NTTN-3′ sequence and ends within about 20 to about 30 nucleotides (e.g., about 17, 18, 19, 20, 21, 22, 23, 24, 25, 26, 27, 28, 29, 30, 31, 32, or 33 nucleotides) downstream of the 5′-NTTN-3′ sequence. In some embodiments, the deletion starts within about 10 to about 15 nucleotides (e.g., about 8, 9, 10, 11, 12, 13, 14, 15, 16, or 17 nucleotides) downstream of a 5′-ATTA-3′, 5′-ATTT-3′, 5′-ATTG-3′, 5′-ATTC-3′, 5′-TTTA-3′, 5′-TTTT-3′, 5′-TTTG-3′, 5′-TTTC-3′, 5′-GTTA-3′, 5′-GTTT-3′, 5′-GTTG-3′, 5′-GTTC-3′, 5′-CTTA-3′, 5′-CTTT-3′, 5′-CTTG-3′, or 5′-CTTC-3′ sequence and ends within about 20 to about 30 nucleotides (e.g., about 17, 18, 19, 20, 21, 22, 23, 24, 25, 26, 27, 28, 29, 30, 31, 32, or 33 nucleotides) downstream of the 5′-ATTA-3′, 5′-ATTT-3′, 5′-ATTG-3′, 5′-ATTC-3′, 5′-TTTA-3′, 5′-TTTT-3′, 5′-TTTG-3′, 5′-TTTC-3′, 5′-GTTA-3′, 5′-GTTT-3′, 5′-GTTG-3′, 5′-GTTC-3′, 5′-CTTA-3′, 5′-CTTT-3′, 5′-CTTG-3′, or 5′-CTTC-3′ sequence. In some embodiments, the deletion starts within about 10 to about 15 nucleotides (e.g., about 8, 9, 10, 11, 12, 13, 14, 15, 16, or 17 nucleotides) downstream of a T/C-rich sequence and ends within about 20 to about 30 nucleotides (e.g., about 17, 18, 19, 20, 21, 22, 23, 24, 25, 26, 27, 28, 29, 30, 31, 32, or 33 nucleotides) downstream of the T/C-rich sequence.

[0278] In some embodiments, the deletion starts within about 10 to about 15 nucleotides (e.g., about 8, 9, 10, 11, 12, 13, 14, 15, 16, or 17 nucleotides) and ends within about 20 to about 25 nucleotides (e.g., about 17, 18, 19, 20, 21, 22, 23, 24, 25, 26, 27, or 28 nucleotides) of the 5′-NTTN-3′ sequence. In some embodiments, the deletion starts within about 10 to about 15 nucleotides (e.g., about 8, 9, 10, 11, 12, 13, 14, 15, 16, or 17 nucleotides) and ends within about 20 to about 25 nucleotides (e.g., about 17, 18, 19, 20, 21, 22, 23, 24, 25, 26, 27, or 28 nucleotides) of a 5′-ATTA-3′, 5′-ATTT-3′, 5′-ATTG-3′, 5′-ATTC-3′, 5′-TTTA-3′, 5′-TTTT-3′, 5′-TTTG-3′, 5′-TTTC-3′, 5′-GTTA-3′, 5′-GTTT-3′, 5′-GTTG-3′, 5′-GTTC-3′, 5′-CTTA-3′, 5′-CTTT-3′, 5′-CTTG-3′, or 5′-CTTC-3′ sequence. In some embodiments, the deletion starts within about 10 to about 15 nucleotides (e.g., about 8, 9, 10, 11, 12, 13, 14, 15, 16, or 17 nucleotides) and ends within about 20 to about 25 nucleotides (e.g., about 17, 18, 19, 20, 21, 22, 23, 24, 25, 26, 27, or 28 nucleotides) of a T/C-rich sequence.

[0279] In some embodiments, the deletion starts within about 10 to about 15 nucleotides (e.g., about 8, 9, 10, 11, 12, 13, 14, 15, 16, or 17 nucleotides) downstream of the 5′-NTTN-3′ sequence and ends within about 20 to about 25 nucleotides (e.g., about 17, 18, 19, 20, 21, 22, 23, 24, 25, 26, 27, or 28 nucleotides) downstream of the 5′-NTTN-3′ sequence. In some embodiments, the deletion starts within about 10 to about 15 nucleotides (e.g., about 8, 9, 10, 11, 12, 13, 14, 15, 16, or 17 nucleotides) downstream of a 5′-ATTA-3′, 5′-ATTT-3′, 5′-ATTG-3′, 5′-ATTC-3′, 5′-TTTA-3′, 5′-TTTT-3′, 5′-TTTG-3′, 5′-TTTC-3′, 5′-GTTA-3′, 5′-GTTT-3′, 5′-GTTG-3′, 5′-GTTC-3′, 5′-CTTA-3′, 5′-CTTT-3′, 5′-CTTG-3′, or 5′-CTTC-3′ sequence and ends within about 20 to about 25 nucleotides (e.g., about 17, 18, 19, 20, 21, 22, 23, 24, 25, 26, 27, or 28 nucleotides) downstream of the 5′-ATTA-3′, 5′-ATTT-3′, 5′-ATTG-3′, 5′-ATTC-3′, 5′-TTTA-3′, 5′-TTTT-3′, 5′-TTTG-3′, 5′-TTTC-3′, 5′-GTTA-3′, 5′-GTTT-3′, 5′-GTTG-3′, 5′-GTTC-3′, 5′-CTTA-3′, 5′-CTTT-3′, 5′-CTTG-3′, or 5′-CTTC-3′ sequence. In some embodiments, the deletion starts within about 10 to about 15 nucleotides (e.g., about 8, 9, 10, 11, 12, 13, 14, 15, 16, or 17 nucleotides) downstream of a T/C-rich sequence and ends within about 20 to about 25 nucleotides (e.g., about 17, 18, 19, 20, 21, 22, 23, 24, 25, 26, 27, or 28 nucleotides) downstream of the T/C-rich sequence.

[0280] In some embodiments, the deletion starts within about 10 to about 15 nucleotides (e.g., about 8, 9, 10, 11, 12, 13, 14, 15, 16, or 17 nucleotides) and ends within about 25 to about 30 nucleotides (e.g., about 22, 23, 24, 25, 26, 27, 28, 29, 30, 31, 32, or 33 nucleotides) of the 5′-NTTN-3′ sequence. In some embodiments, the deletion starts within about 10 to about 15 nucleotides (e.g., about 8, 9, 10, 11, 12, 13, 14, 15, 16, or 17 nucleotides) and ends within about 25 to about 30 nucleotides (e.g., about 22, 23, 24, 25, 26, 27, 28, 29, 30, 31, 32, or 33 nucleotides) of a 5′-ATTA-3′, 5′-ATTT-3′, 5′-ATTG-3′, 5′-ATTC-3′, 5′-TTTA-3′, 5′-TTTT-3′, 5′-TTTG-3′, 5′-TTTC-3′, 5′-GTTA-3′, 5′-GTTT-3′, 5′-GTTG-3′, 5′-GTTC-3′, 5′-CTTA-3′, 5′-CTTT-3′, 5′-CTTG-3′, or 5′-CTTC-3′ sequence. In some embodiments, the deletion starts within about 10 to about 15 nucleotides (e.g., about 8, 9, 10, 11, 12, 13, 14, 15, 16, or 17 nucleotides) and ends within about 25 to about 30 nucleotides (e.g., about 22, 23, 24, 25, 26, 27, 28, 29, 30, 31, 32, or 33 nucleotides) of a T/C-rich sequence.

[0281] In some embodiments, the deletion starts within about 10 to about 15 nucleotides (e.g., about 8, 9, 10, 11, 12, 13, 14, 15, 16, or 17 nucleotides) downstream of the 5′-NTTN-3′ sequence and ends within about 25 to about 30 nucleotides (e.g., about 22, 23, 24, 25, 26, 27, 28, 29, 30, 31, 32, or 33 nucleotides) downstream of the 5′-NTTN-3′ sequence. In some embodiments, the deletion starts within about 10 to about 15 nucleotides (e.g., about 8, 9, 10, 11, 12, 13, 14, 15, 16, or 17 nucleotides) downstream of a 5′-ATTA-3′, 5′-ATTT-3′, 5′-ATTG-3′, 5′-ATTC-3′, 5′-TTTA-3′, 5′-TTTT-3′, 5′-TTTG-3′, 5′-TTTC-3′, 5′-GTTA-3′, 5′-GTTT-3′, 5′-GTTG-3′, 5′-GTTC-3′, 5′-CTTA-3′, 5′-CTTT-3′, 5′-CTTG-3′, or 5′-CTTC-3′ sequence and ends within about 25 to about 30 nucleotides (e.g., about 22, 23, 24, 25, 26, 27, 28, 29, 30, 31, 32, or 33 nucleotides) downstream of the 5′-ATTA-3′, 5′-ATTT-3′, 5′-ATTG-3′, 5′-ATTC-3′, 5′-TTTA-3′, 5′-TTTT-3′, 5′-TTTG-3′, 5′-TTTC-3′, 5′-GTTA-3′, 5′-GTTT-3′, 5′-GTTG-3′, 5′-GTTC-3′, 5′-CTTA-3′, 5′-CTTT-3′, 5′-CTTG-3′, or 5′-CTTC-3′ sequence. In some embodiments, the deletion starts within about 10 to about 15 nucleotides (e.g., about 8, 9, 10, 11, 12, 13, 14, 15, 16, or 17 nucleotides) downstream of a T/C-rich sequence and ends within about 25 to about 30 nucleotides (e.g., about 22, 23, 24, 25, 26, 27, 28, 29, 30, 31, 32, or 33 nucleotides) downstream of the T/C-rich sequence.

[0282] In some embodiments, the deletion is up to about 50 nucleotides in length (e.g., about 1, 2, 3, 4, 5, 6, 7, 8, 9, 10, 11, 12, 13, 14, 15, 16, 17, 18, 19, 20, 21, 22, 23, 24, 25, 26, 27, 28, 29, 30, 31, 32, 33, 34, 35, 36, 37, 38, 39, 40, 41, 42, 43, 44, 45, 46, 47, 48, 49, or 50 nucleotides). In some embodiments, the deletion is up to about 40 nucleotides in length (e.g., about 1, 2, 3, 4, 5, 6, 7, 8, 9, 10, 11, 12, 13, 14, 15, 16, 17, 18, 19, 20, 21, 22, 23, 24, 25, 26, 27, 28, 29, 30, 31, 32, 33, 34, 35, 36, 37, 38, 39, 40, 41, 42, 43, 44, or 45 nucleotides). In some embodiments, the deletion is between about 4 nucleotides and about 40 nucleotides in length (e.g., about 3, 4, 5, 6, 7, 8, 9, 10, 11, 12, 13, 14, 15, 16, 17, 18, 19, 20, 21, 22, 23, 24, 25, 26, 27, 28, 29, 30, 31, 32, 33, 34, 35, 36, 37, 38, 39, 40, 41, 42, 43, 44, or 45 nucleotides). In some embodiments, the deletion is between about 4 nucleotides and about 25 nucleotides in length (e.g., about 3, 4, 5, 6, 7, 8, 9, 10, 11, 12, 13, 14, 15, 16, 17, 18, 19, 20, 21, 22, 23, 24, 25, 26, 27, or 28 nucleotides). In some embodiments, the deletion is between about 10 nucleotides and about 25 nucleotides in length (e.g., about 7, 8, 9, 10, 11, 12, 13, 14, 15, 16, 17, 18, 19, 20, 21, 22, 23, 24, 25, 26, 27, or 28 nucleotides). In some embodiments, the deletion is between about 10 nucleotides and about 15 nucleotides in length (e.g., about 7, 8, 9, 10, 11, 12, 13, 14, 15, 16, or 17 nucleotides).

[0283] In some embodiments, the methods described herein are used to engineer a cell comprising a deletion as described herein in a BCL11A gene.

[0284] Compositions, vectors, nucleic acids, RNA guides and cells disclosed herein may be used in therapy. Compositions, vectors, nucleic acids, RNA guides and cells disclosed herein may be used in methods of treating a disease or condition in a subject. Any suitable delivery or administration method known in the art may be used to deliver compositions, vectors, nucleic acids, RNA guides and cells disclosed herein. Such methods may involve contacting a target sequence with a composition, vector, nucleic acid, or RNA guide disclosed herein. Such methods may involve a method of editing a BCL11A sequence as disclosed herein. In some embodiments, a cell engineered using an RNA guide disclosed herein is used for ex vivo gene therapy. In some embodiments, the compositions, vectors, nucleic acids, RNA guides and cells disclosed herein are used in the treatment of sickle cell anemia. In some embodiments, the compositions, vectors, nucleic acids, RNA guides and cells disclosed herein are used in the treatment of beta-thalassemia. In some embodiments, wherein one or more RNA guides targets the enhancer region of BCL11A (SEQ ID NO: 2640), the one or more RNA guides are used in the treatment of sickle cell anemia or beta-thalassemia.

### Kits

[0285] The invention also provides kits or systems that can be used, for example, to carry out a method described herein. In some embodiments, the kits or systems include an RNA guide and a Cas12i polypeptide. In some embodiments, the kits or systems include a polynucleotide that encodes such a Cas12i polypeptide, and optionally the polynucleotide is comprised within a vector, e.g., as described herein. In some embodiments, the kits or systems include a polynucleotide that encodes an RNA guide disclosed herein. The Cas12i polypeptide and the RNA guide (e.g., as a ribonucleoprotein) can be packaged within the same or other vessel within a kit or system or can be packaged in separate vials or other vessels, the contents of which can be mixed prior to use. The kits or systems can additionally include, optionally, a buffer and/or instructions for use of the RNA guide and Cas12i polypeptide.

[0286] All references and publications cited herein are hereby incorporated by reference.

### EXAMPLES

[0287] The following examples are provided to further illustrate some embodiments of the present invention but are not intended to limit the scope of the invention; it will be understood by their exemplary nature that other procedures, methodologies, or techniques known to those skilled in the art may alternatively be used.

### Example 1—Editing of BCL11A in a Mammalian Cell

[0288] This example describes generation of modified CD34+ hematopoietic stem/progenitor cells (HSPC) with variant Cas12i2. For this study, human primary CD34+ HSPCs were transfected with BCL11A intronic erythroid enhancer-targeting RNPs comprising variant Cas12i2 of SEQ ID NO: 2642 and RNA guide. The modified CD34+ HSPCs were analyzed by FACS staining and indel assessment at the BCL11A intronic erythroid enhancer target.

[0289] Two frozen human bone marrow CD34+ cell vials per cell lot were thawed (Day 0), washed and assessed for cell number and viability by acridine orange/propidium iodide (AO/PI) staining using a cell counter. CD34+ cells were cultured in serum-free expansion media (from StemCell Technologies) with the appropriate supplement for approximately 48 hours.

[0290] RNP Complexation Reactions:

[0291] Variant Cas12i2 RNP complexes were prepared by mixing purified variant Cas12i2 of SEQ ID NO: 2642 (400 μM) with different RNA guides (1 mM in 250 mM NaCl) at a 1:1 Cas12i2 effector:RNA guide volume ratio (corresponding to 2.5:1 RNA guide:Cas12i2 effector molar ratio). SpCas9 RNP complexes were prepared by mixing purified SpCas9 (62 μM) with single guide RNA (sgRNA) (1 mM in water) at a 6.45:1 SpCas9 effector: sgRNA volume ratio (corresponding to 2.5:1 sgRNA: SpCas9 effector molar ratio). SpCas9 protein was purchased from Aldevron. Sequences of RNA guides and sgRNA are shown in Table 6.

TABLE 6
Sequences of BCL11A intronic erythroid enhancer-targeting RNA guides (for variant
Cas12i2) and sgRNA (for SpCas9) used for RNP complexes

| | | | | DNA | |
|---|---|---|---|---|---|
| Guide Name | Gene | Effector | PAM | Strand | RNA guide |
| Cas12i2_BCL11A_ | BCL11A | Cas12i2 | CTTT | Antise | AGAAAUCCGUCUUUCAUUGACGGG |
| enh_T1 | enhancer | | | nse | AAGCUAGUCUAGUGCAAGC (SEQ ID |
| | | | | | NO: 2677) |
| Cas12i2_BCL11A_ | BCL11A | Cas12i2 | CTTC | Sense | AGAAAUCCGUCUUUCAUUGACGGC |
| enh_T4 | enhancer | | | | UGGAGCCUGUGAUAAAAGC (SEQ ID |
| | | | | | NO: 2678) |
| Cas12i2_BCL11A_ | BCL11A | Cas1212 | CTTC | Sense | AGAAAUCCGUCUUUCAUUGACGGU |
| enh_T5 | enhancer | | | | ACCCCACCCACGCCCCCAC (SEQ ID |
| | | | | | NO: 2679) |
| SpCas9_BCL11A_ | BCL11A | SpCas9 | AGG | Antise | mC*mU*mA*ACAGUUGCUUUUAUCA |
| enh_T1 | enhancer | | | nse | CGUUUUAGAGCUAGAAAUAGCAAG |
| | | | | | UUAAAAUAAGGCUAGUCCGUUAUC |
| | | | | | AACUUGAAAAAGUGGCACCGAGUC |
| | | | | | GGUGCmU*mU*mU*U (SEQ ID NO: |
| | | | | | 2680) |

*-phosphorothioated
m-2′ O-methyl

[0292] For effector only controls, variant Cas12i2 or SpCas9 were mixed with protein storage buffer (25 mM Tris, pH 7.5, 250 mM NaCl, 1 mM TCEP, 50% glycerol) at the same volume ratio as the RNA guide or sgRNA, respectively. Complexations were incubated at 37 degrees Celsius for 30-60 minutes. Following incubation, RNPs were diluted to 18.75 μM, 50 μM, 100 μM, or 160 μM effector concentration for variant Cas12i2 and 18.75 μM or 50 μM for SpCas9. For multiplexing, separate RNPs were mixed together prior to electroporation.

[0293] On Day 2, approximately 1e5 cells per electroporation reaction, plus 20% extra, were harvested and counted. Cells were washed once with PBS and resuspended in buffer+supplement (from Lonza #VXP-3032)+1 mM transfection enhancer oligo (to bring concentration to 4.28 μM in P3 buffer). Concentration of resuspended cells was approximately 5,555 cells/μL. 18 μL of resuspended cells (˜1e5 cells) were mixed with 2 μL of individual or multiplexed RNP complexes to bring final concentration of variant Cas12i2 RNPs to 1.875 PM, 5 PM, 10 μM or 16 PM. Final concentration of SpCas9 RNPs was 1.875 μM or 5 μM. The following controls were set up: unelectroporated cells only, cells in protein storage buffer only. The plate was electroporated using an electroporation device, excluding the unelectroporated conditions. Each electroporation reaction was transferred into 24-well culture plate well containing pre-warmed serum-free media and the appropriate supplement. Cultures were incubated at 37 degrees Celsius, 5% CO₂ for 3 days.

[0294] A portion of cell samples (approximately 20 μL) from each test condition was collected at 24, 48, and 72 h post electroporation. Viability was evaluated using AO/PI stain on a cell counter.

[0295] On Day 3, cell pellets were prepared from cells remaining after viability testing. Approximately 5e4 cells from each sample were harvested and transferred to a microcentrifuge tube. Cells were pelleted at 1500 rpm for 5 min. Supernatants were removed and pellets were frozen at −80° C.

[0296] For genomic DNA extraction, pellets were thawed to room temperature and resuspended in appropriate volume of DNA extraction buffer (from Lucigen) to give final concentration of 1000 cells/μL. Samples were then cycled in PCR machine at 65° C. for 15 min, 68° C. for 15 min, 98° C. for 10 min. Samples were then frozen at −20° C.

[0297] Samples for Next Generation Sequencing (NGS) were prepared by rounds of PCR. The first round (PCR I) was used to amplify the genomic regions flanking the target site and add NGS adapters. The second round (PCR II) was used to add NGS indexes. Reactions were then pooled, purified by column purification, and quantified on a fluorometer (Qubit). Sequencing runs were done using a 300 or 150 cycle NGS instrument (NextSeq v2.5) mid or high output kit and run on an NGS instrument (NextSeq 550).

[0298] For NGS analysis, the indel mapping function used a sample's fastq file, the amplicon reference sequence, and the forward primer sequence. For each read, a kmer-scanning algorithm was used to calculate the edit operations (match, mismatch, insertion, deletion) between the read and the reference sequence. In order to remove small amounts of primer dimer present in some samples, the first 30 nucleotides of each read were required to match the reference and reads where over half of the mapping nucleotides are mismatches were filtered out as well. Up to 50,000 reads passing those filters were used for analysis, and reads were counted as an indel read if they contained an insertion or deletion. The indel % was calculated as the number of indel-containing reads divided by the number of reads analyzed (reads passing filters up to 50,000). The QC standard for the minimum number of reads passing filters was 10,000. Indels were further assessed for disruption of the GATAA motif sequence by searching for TTATC (reverse complement of GATAA sequence, on the forward strand) sequence in each indel.

[0299] FIG. 1 and FIG. 2 demonstrate the results of this example. As shown in FIG. 1, BCL11A intronic erythroid enhancer-targeting RNP complexes comprising variant Cas12i2 and RNA guide resulted in indel activity in primary CD34+ HSPCs. The data showed that at least 50% of variant Cas12i2-induced indels partially or fully disrupted the GATAA motif of BCL11A intronic erythroid enhancer region.

[0300] FIG. 2 illustrates that modified CD34+ HSPCs generated with variant Cas12i2 editing of BCL11A intronic erythroid enhance were viable at least 72 hours after treatment of primary CD34+ HSPCs with variant Cas12i2 RNP complexes.

[0301] This example demonstrated that Cas12i2 complexed with the tested RNA guides comprised robust indel activity. Variant Cas12i2 RNPs that targeted BCL11A intronic erythroid enhancer region-targeting were used to generate modified CD34+ HSPCs and resulted in at least about 50% partial or complete disruption of the GATAA motif in the modified cells. The results also show that more than one RNA guide (e.g., multiplexed RNA guides) can be used to introduce indels into BCL11A.

| | | |
|---|---|---|
| Nucleotide | atgagcagcg cgatcaaaag ctacaagagc gttctgcgtc cgaacgagcg taagaaccaa | 60 |
| sequence | ctgctgaaaa gcaccattca gtgcctggaa gacggtagcg cgttcttttt caagatgctg | 120 |
| encoding | caaggcctgt ttggtggcat caccccggag attgttcgtt tcagcaccga acaggagaaa | 180 |
| Cas12i2- | cagcaacagg atatcgcgct gtggtgcgcg gttaactggt tccgtccggt gagccaagac | 240 |
| SEQ ID NO: | agcctgaccc acaccattgc gagcgataac ctggtggaga agtttgagga atactatggt | 300 |
| 2633 | ggcaccgcga gcgacgcgat caaacagtac ttcagcgcga gcattggcga aagctactat | 360 |
| | tggaacgact gccgtcaaca gtactatgat ctgtgccgtg agctgggtgt tgaggtgagc | 420 |
| | gacctgaccc atgatctgga gatcctgtgc cgtgaaaagt gcctggcggt tgcgaccgag | 480 |
| | agcaaccaga acaacagcat cattagcgtt ctgtttggca ccggcgaaaa agaggaccgt | 540 |
| | agcgtgaaac tgcgtatcac caagaaaatt ctggaggcga tcagcaacct gaaagaaatc | 600 |
| | ccgaagaacg ttgcgccgat tcaagagatc attctgaacg tggcgaaagc gaccaaggaa | 660 |
| | accttccgtc aggtgtatgc gggtaacctg ggtgcgccga gcaccctgga gaaatttatc | 720 |
| | gcgaaggacg gccaaaaaga gttcgatctg aagaaactgc agaccgacct gaagaaagtt | 780 |
| | attcgtggta aaagcaagga gcgtgattgg tgctgccagg aagagctgcg tagctacgtg | 840 |
| | gagcaaaaca ccatccagta tgacctgtgg gcgtggggcg aaatgttcaa caaagcgcac | 900 |
| | accgcgctga aaatcaagag cacccgtaac tacaactttg cgaagcaacg tctggaacag | 960 |
| | ttcaaagaga ttcagagcct gaacaacctg ctggttgtga agaagctgaa cgactttttc | 1020 |
| | gatagcgaat ttttcagcgg cgaggaaacc tacaccatct gcgttcacca tctgggggc | 1080 |
| | aaggacctga gcaaactgta taaggcgtgg gaggatgatc cggcggaccc ggaaaacgcg | 1140 |
| | attgtggttc tgtgcgacga tctgaaaaac aactttaaga aagagccgat ccgtaacatt | 1200 |
| | ctgcgttaca tcttcaccat tcgtcaagaa tgcagcgcgc aggacatcct ggcggcggcg | 1260 |
| | aagtacaacc aacagctgga tcgttataaa agccaaaagg cgaacccgag cgttctgggt | 1320 |
| | aaccagggct ttacctggac caacgcggtg atcctgccgg agaaggcgca gcgtaacgac | 1380 |
| | cgtccgaaca gcctggatct gcgtatttgg ctgtacctga aactgcgtca cccggacggt | 1440 |
| | cgttggaaga aacaccatat cccgttctac gatacccgtt tcttccaaga aatttatgcg | 1500 |
| | gcgggcaaca gcccggttga cacctgccag tttcgtaccc cgcgtttcgg ttatcacctg | 1560 |
| | ccgaaactga ccgatcagac cgcgatccgt gttaacaaga aacatgtgaa agcggcgaag | 1620 |
| | accgaggcgc gtattcgtct ggcgatccaa cagggcaccc tgccggtgag caacctgaag | 1680 |
| | atcaccgaaa ttagcgcgac catcaacagc aaaggtcaag tgcgtattcc ggttaagttt | 1740 |
| | gacgtgggtc gtcaaaaagg caccctgcag atcggtgacc gtttctgcgg ctacgatcaa | 1800 |
| | aaccagaccg cgagccacgc gtatagcctg tgggaagtgg ttaaagaggg tcaataccat | 1860 |
| | aaagagctgg gctgctttgt tcgtttcatc agcagcggtg acatcgtgag cattaccgag | 1920 |
| | aaccgtggca accaatttga tcagctgagc tatgaaggtc tggcgtaccc gcaatatgcg | 1980 |
| | gactggcgta agaaagcgag caagttcgtg agcctgtggc agatcaccaa gaaaaacaag | 2040 |
| | aaaaaggaaa tcgtgaccgt tgaagcgaaa gagaagtttg acgcgatctg caagtaccag | 2100 |
| | ccgcgtctgt ataaattcaa caaggagtac gcgtatctgc tgcgtgatat tgttcgtggc | 2160 |
| | aaaagcctgg tggaactgca acagattcgt caagagatct ttcgtttcat tgaacaggac | 2220 |
| | tgcggtgtta cccgtctggg cagcctgagc ctgagcaccc tggaaaccgt gaaagcggtt | 2280 |
| | aagggtatca tttacagcta ttttagcacc gcgctgaacg cgagcaagaa caacccgatc | 2340 |
| | agcgacgaac agcgtaaaga gtttgatccg gaactgttcg cgctgctgga aaagctggag | 2400 |
| | ctgattcgta cccgtaaaaa gaaacaaaaa gtggaacgta tcgcgaacag cctgattcag | 2460 |
| | acctgcctgg agaacaacat caagttcatt cgtggtgaag gcgacctgag caccaccaac | 2520 |
| | aacgcgacca agaaaaaggc gaacagccgt agcatggatt ggttggcgcg tggtgttttt | 2680 |
| | aacaaaatcc gtcaactggc gccgatgcac aacattaccc tgttcggttg cggcagcctg | 2640 |
| | tacaccagcc accaggaccc gctggtgcat cgtaacccgg ataaagcgat gaagtgccgt | 2700 |
| | tgggcggcga tcccggttaa ggacattggc gattgggtgc tgcgtaagct gagccaaaac | 2760 |
| | ctgcgtgcga aaaacatcgg caccggcgag tactatcacc aaggtgttaa agagttcctg | 2820 |
| | agccattatg aactgcagga cctggaggaa gagctgctga agtggcgtag cgatcgtaaa | 2880 |
| | agcaacattc cgtgctgggt gctgcagaac cgtctggcgg agaagctggg caacaaagaa | 2940 |
| | gcggtggttt acatcccggt tcgtggtggc cgtatttatt ttgcgaccca caaggtggcg | 3000 |
| | accggtgcgg tgagcatcgt tttcgaccaa aaacaagtgt gggtttgcaa cgcggatcat | 3060 |
| | gttgcggcgg cgaacatcgc gctgaccgtg aagggtattg gcgaacaaag cagcgacgaa | 3120 |
| | gagaacccgg atggtagccg tatcaaactg cagctgacca gc | 3162 |

| | |
|---|---|
| Cas12i2 | MSSAIKSYKSVLRPNERKNQLLKSTIQCLEDGSAFFFKMLQGLEGGITPEIVRESTEQEK |
| amino acid | QQQDIALWCAVNWFRPVSQDSLTHTIASDNLVEKFEEYYGGTASDAIKQYFSASIGESYY |
| sequence- | WNDCRQQYYDLCRELGVEVSDLTHDLEILCREKCLAVATESNQNNSIISVLFGTGEKEDR |
| SEQ ID NO: | SVKLRITKKILEAISNLKEIPKNVAPIQEIILNVAKATKETFRQVYAGNLGAPSTLEKFI |
| 2634 | AKDGQKEFDLKKLQTDLKKVIRGKSKERDWCCQEELRSYVEQNTIQYDLWAWGEMENKAH |
| | TALKIKSTRNYNFAKQRLEQFKEIQSLNNLLVVKKLNDFFDSEFFSGEETYTICVHHLGG |
| | KDLSKLYKAWEDDPADPENAIVVLCDDLKNNFKKEPIRNILRYIFTIRQECSAQDILAAA |
| | KYNQQLDRYKSQKANPSVLGNQGFTWTNAVILPEKAQRNDRPNSLDLRIWLYLKLRHPDG |
| | RWKKHHIPFYDTRFFQEIYAAGNSPVDTCQFRTPRFGYHLPKLTDQTAIRVNKKHVKAAK |
| | TEARIRLAIQQGTLPVSNLKITEISATINSKGQVRIPVKFDVGRQKGTLQIGDRFCGYDQ |
| | NQTASHAYSLWEVVKEGQYHKELGCFVRFISSGDIVSITENRGNQFDQLSYEGLAYPQYA |
| | DWRKKASKFVSLWQITKKNKKKEIVTVEAKEKFDAICKYQPRLYKENKEYAYLLRDIVRG |
| | KSLVELQQIRQEIFRFIEQDCGVTRLGSLSLSTLETVKAVKGIIYSYFSTALNASKNNPI |
| | SDEQRKEFDPELFALLEKLELIRTRKKKQKVERIANSLIQTCLENNIKFIRGEGDLSTIN |
| | NATKKKANSRSMDWLARGVFNKIRQLAPMHNITLFGCGSLYTSHQDPLVHRNPDKAMKCR |
| | WAAIPVKDIGDWVLRKLSQNLRAKNIGTGEYYHQGVKEFLSHYELQDLEEELLKWRSDRK |
| | SNIPCWVLQNRLAEKLGNKEAVVYIPVRGGRIYFATHKVATGAVSIVFDQKQVWVCNADH |
| | VAAANIALTVKGIGEQSSDEENPDGSRIKLQLTS |
| BCL11A- | GTCTCTGTCCATCCAGACTCCTGACGTTCAAGTTCGCAGGGACGTCACGTCCGCACTTGAACTTG |
| SEQ ID NO: | CAGCTCAGGGGGGCTTTTGCCATTTTTTTCATCTCTCTCTCTCTCTCTCCCTCTATCTCTCTTCT |
| 2635 | CTCTCTCTCCCTCTTTTTTTTTTTTTTTTTTTTTTTTTTTTTGCTTAAAAAAAAGCCATGACGGC |
| | TCTCCCACAATTCATCTTCCCTGCGCCATCTTTGTATTATTTCTAATTTATTTTGGATGTCAAAA |
| | GGCACTGATGAAGATATTTTCTCTGGAGTCTCCTTCTTTCTAACCCGGCTCTCCCGATGTGAACC |
| | GAGCCGTCGTCCGCCCGCCGCCGCCGCCGCCGCCGCCGCCGCCCGCCCCGCAGCCCACCATGTCT |
| | CGCCGCAAGCAAGGCAAACCCCAGCACTTAAGCAAACGGGAATTCTCGCGTAAGTAACCCAATAA |
| | TAGTAATAATAATTATTAATAATCACGAGAGCGCGCAGGACTAGAAGCAAAAGCGAGGGGGAGAG |
| | AGGGGTGTGTGCATGCATTTTTAAATTTTTCACGAGAAAAACCTCCGAGAGTCGAGGTAAAAGAG |
| | ATAAAGGGGGAAAAAACCCTCATCCCATCTGGAACCATTGCCGTGTATGCACTTTTGAGACAGCA |
| | CGCACCTTTTAATTTTATTTAATTTTACAAAAATTTGACTCCTCCTCTTTCCTCCTTTCCGCCGC |
| | TTTATTTCTCTTTTCGAAAAGGAATGCAATGATTCCACTCCCCCCCCGCCCCGCCAGTTTTGCAA |
| | AATAATGAACAATGCTAAGGTTGCGAACAACTCACATGCAAACCTGGGGGTGGGAGCTGGTGGGG |
| | AAAGGGAGGTTGCTTCCCACTCACCGTAAGAAAATGGGGGGGTAGGGAGGGAGTGAGTACAAGTC |
| | TAAAAAACGATTCCCGGGGAGAAAAGAGGTGAGACTGGCTTTTGGACACCAGCGCGCTCACGGTC |
| | AAGTGTGCAGCGGGAGGAAAGTAGTCATCCCCACAATAGTGAGAAAGTGGCACTGTGGAAAGGGG |
| | CCCCCGGCGCTCCTGAGTCCGCGGAGTCGGGAGAGGGGCCGCGGCGACGGGGAGAGCCGTGGGAC |
| | CGGGAAGGACGGGAGACGCGGCCGGCACTGCCGCCTTTTGTTCCGGCCAGAGGTGGGTGTTTGTC |
| | CCGCTGCCTTTTGTGCCGGCTCCTCGCGCTTGCCCTCCCGCGCCGCCGCCGCCGCCGCCGCCGAA |
| | GGGCAGGAGCTAGGGCCGGGGGAGGAGGCGGCCGGGGGCACGCGGGAGAGGGAGGGAGGGAGCCC |
| | GGACTGCTGCCTCCTGGGTTGCCGCTGCCCTCCCCTCCCGACCGAACCTCAGAGGCAGCAAGGAG |
| | AAGACTGGCACATAAATAAATAAATACATAAAAATAAAATAAATAAAACAAGGCAAGAGAATGTA |
| | CAATTTCTTGCCCCCAAACCGAAGCCAAACGCTCTGCCAACCCTTTTCTGTGACGGCCTTCTCTT |
| | TGACTCCCCCACCAGCCCCCCTGCAAAAATCTCACAATCTCTCATCTAGAAAAAAATTTACAATC |
| | ACCCTCTTCCCCCAAACCCCTTCAGTTGCAAACTTAGGGCGCCGACGGCACGGAGAGGGAGAGAG |
| | GAACTCCCTCCTCTTACTATTTTTTGGAAGATTTTCAAAAAAAGTGGAAGTGGATTTTGATTGGG |
| | AAAAATCTCGTGTCTGAATGTTTACAAGCACCGCGTGTGCGGGAGCCTCCTGCCAACAAACAGAC |
| | AGAGGACCGAGCGCGGCGCGGCAGCCCCGGAGCAGGCGGCGGCGGCGGCCTGGCCTCGCCCGGGC |
| | CTTGCCCGACCTCGCCGCGCCCCAGCCCAGCCCCGGATCGCCCACCCGGCGCCCGGCGCCCACCC |
| | GCCAGGCACGGCGGCAGGCCACGCAGTGTCTCCGCGCCAGCCTGGCCCGTGGTCCTGGTCCGCCC |
| | CCAGCACAATGCCGAGACCTCTTCTCGACCTCCCAGACTGCGAAATCGGCTGGGTGAAACTCGGC |
| | TTTGCAAAGCATTTTTATTTTGCAGGGCAACTGTAAAAGCGCGTTCTGCGCCTCCCCTCCCCTCC |
| | GCCCTGGGTACTTTCTCAGACGTCTCTTGTCCACAGCTCGGGACCGCGAGGAGGTCACCACGTGC |
| | TTTCCCTGCCCACCCCCCACCCCGCCCGGTCTGGTCACCAGTCCCCCTGCGCCCCGAGCACGACT |
| | AGGCCAGGTGGCGGGGTTGCCGGGGAAGGGCAGGGGAGAAGTGTGTTTGAGTGTGCATTTTAAGG |
| | GCGCTGGATCCTGGGACCCCGAGCACTTCACCCTTTGGGTCTTGCCCTCTTCCCCAGGCCTGGCT |
| | TGGTCTGAGGTTCTTGTGAGTCTGTATAAGAGCTGGTGGTGGTGGCTGTCTCCCGCTGACTGCGC |
| | CTGGAAAGGCGGGCGGTGGGCACTTAGGAAAGTTTGGCAGCAAGGGAAAGAAAGGCGTGAGGGCC |
| | CACATTCCCCCCCTACTCAATTTATGATTCTTACTTTAAATTTTTGATGCAGTTTTAAAGGACCA |
| | CCTATACTTGGTTCTGTGTTTTTTTAAAGGGGTGGTGGTGGGGGGTGCGCACAGGGAATTTAATT |
| | TTTCACTGGGCCCTGGAACTTGTCACACACTTCGGAAGCTCCCCCACCCCGGCACGTTGCGCGGC |
| | CCTCCCTCTCCCCACCCCCTCGCATCCCTCCCTCGCCGCTCTCCCCCGCCCCCAACTCCCCCGGC |
| | CGCGCCGGATGCGGATCAGACGCGGCGCGCGGCGGTGTGAAGTTACAGCCCGGCCAGGTACCGGC |
| | GGGAAGGAAGGGCAGTGTTCGCAGGACTCGGGAAAGTCAGGCCCTTCTTCGGAAGGATGCAGTGG |
| | GGGCTCAAAGGACAGACCGGGGCGCGCAGTCCAGGCTGCTCCCTCGTACCCCTCTCCCTCCTGGG |
| | TCCATCTTGGGACACTCTAGGCTGGGAGGGTTAGTACCCCCTCCTCCTGTCCCGGGGTTAAAGGG |
| | CCAGTTTGGGAGGGGGTGAGGGGGCCACTTCTTTCTGTCCTCATTTTCTGGGTGCTCAGAGGGGG |
| | CAGGAGCCATCCCGGTCCTCAGTACCACCCCCCCGCCCCCCGCCTCTGCTATGTGGGCTGAATGA |
| | GCCATTCGGTCGCTAGGAGGCAGAACAAGATCAAGAAAGCTCAGCGAACTTGAACCTGTACCAGA |
| | GCCTCCCCCACCTCCTGCCCGGCGATTCTCGTCCGGGGAGGAACGAGCTTTGCGAGGGTGGGGGT |
| | GGGGGGAAAGAACGGTTAGGCAGAATTCCCTTTCTCTCCCCCATCACCCCGTATGTCTTTGTTCT |
| | TCATTTTGACTTTAAAAATGCTTCTGGCCGGGGCCGCGGAGAAGCGACCGGGCGCGCGGCCGACA |
| | CCCCCGTGCGCGAGCTGAGACCAGCGCGCGCCGGGCTCGGAGCACGGTGCAGTTTTCGCTTTCTT |
| | TCGGGGCCGGCATTTTTGGTAGGGAGGAACCGGGAGTGCGCGCTCTAGGGCTTCGGGGCATGGCC |
| | GAAGAGGGGGATATGGCAAGTTTGCACTTGGTCTCCAGCCTCACTTCTTCCACCCCCTCACCCCC |
| | ATGCAAAGCACAGACCTCGGTGGCCTCGGCTGGCTTGCTGGGCGGCTCTGCAGCCCGACACCCCC |
| | CCTCTCGCCTCGGAGCTCGGAATCACAACAATAGTAATAGTTATCATCATAATGATGCGGGCAGG |
| | CAGCGTCATTAATAATGAATAACCGCAGCCGCCGCCGCGCACACCCAGTGCCCAGAATTGCGGGG |
| | GAAATGCATTTGCAGAGATCCCCCAAAGTAAAAAGTGTAAGCTTGTGGACACAGAATGAATCTCA |
| | GGACCCGCGCTTGAGGTGTGTGCGGAGATACTGAGACTGCACCAGGTTAACCAGCCGGGTTTTCC |
| | AAACCTCACTTCCTTTTTCACCAACTGGCAGGCCCAGGGAACCGTCACCCCGCGGCCGAGCTGGC |
| | CGAGCTGGACGGGCATGGAGGCAGCAGTCAGGGCCCCTGGCTGCCCTCCGTCTCCGGGCCCCCGG |
| | GCCCCAAGGCCCCGCGGCCGCTGCTGCACGTGTTCGCAGCAAGCGCGGCGGGAGCCTGCAGCCAG |
| | CACGCTGCTCGCTTTGTGCCTCAGAGTCCCCGCGCCCAACTTCACTTTCTGCACGGTCCACCCTT |
| | GCCGGGGCCCCTGCCCCGGGCCTGTAGCCCCCGGCTTTGCTTTTGTTTCTTTGCTTTTCCTCTCT |
| | GAATTTCAGCCTCCGTTTGCTTCTTTACCCTGTTAAGACAATCAAGGAGAAGGACTTGGAAAGCA |
| | AACTTGAAGACACATCTCCCTTTCCCCCTCCCCCTCCGCTCCCCGGCAGCTCTCGTTTTGCTCGC |
| | TCCTTACCAACATTTCCTATAAGGATTATTTTTTTCCCTTAAATTTATTCTTTTGCAACTACACA |
| | GAGAGGAAAGAGATCTCAGTCTGTCACTGAGACATTGAGACGTTCCAGGCTGTCTTGCTGTTTGA |
| | ACGTAGAAGCATTTTATTTTCTATTTCTTCCTCCCCTCGTAGAGAGAATTCGCGGCTAATTATTA |
| | TGATTATTTGCCCACTCCCTTCCACTTCAATCGAGGACTCCCTGCTTTGTAGCCGGAGTTTAGGC |
| | CGGAGCTTAGAAATGTTGGTATTGTTGGGGCGAAGGAGGATGGAGTTGAATTGAGGGAGGGGGTA |
| | AATGGCTGAGGGTTAGGAAGGTTTTTAGGGAAAGGGGAATTTGCATTAAAATGCAGAGAAATTAT |
| | CAGATGCCCAGAAAGGAAATGTTGATTGCCACTGAGAAAAGATGTCAATGCAAATCAGTAGACTA |
| | CACCATGAGAATTGTATTTTCATATTTTCTTTGTGTCCCACTTTGTCTGATTTTTAATAATATAC |
| | CAGCAATGATAAAAACACGTTTTGGTATTTCTCTGAACACCACTAGCCAAATGTTTTGCAAGGAG |
| | ACCGATGTTAAACGTATTTCATACATTAGAATATAATTCTTGTTAATTAGCAATAATTTACGTTA |
| | AGAGCATAGAAAATGTTGAGGTTACAGGTTTTATATCTGTACATTTGATCATCTTGTTATTTTCA |
| | AGAACTTTGCCTCCTATAAAATTAATTAGGTGAAATGTGGAGGTGTAATCAGCAACCTCTGAATT |
| | ACCACTTCATTTCCCGGTTTTGATTGTAAATCAGTTCAGTCACTACATTTAGAAGACTTTAACCA |
| | AGTCTGTTTTGAACCACATTACCTTTAACTATTTGATACCTAGGAGAATATTTCCTTTTGCACCT |
| | AAATAATATTCCCACTTTTAGAAATGTGTCAGACCTTGGGAACAAAAAAAAAAAAAAAAGAATCT |
| | TAACGGTGGAAATAAAAAATTTTTTTTTTTGCAAAGGTTCTATGTACTAGTAAGTTTGATAAAAT |
| | ATTTTCCTAAGTCTTCCTTCAGTCTGTAAACCTCAGAACTTGTAGCTAATGCTAAACAAAAAAGC |
| | CACATTTATCAATGTGTACTTAAAATCCTTAATTCAGACAACAGGAATATTTTGAGAATGAGTTC |
| | CCTATTCCTCACTTGGTCAAAATGGAAGCAAATGTAAGAGAAGAATGACATTAAGGCACAATGCA |
| | GAGGCACTTCTGTTTGTCTTCTTTTATTTGAAAAGTATGCATATGTATTCTGTATTTATCTTTTG |
| | GCCAGTATGTTGGGCAAAGAAACATAAGTGCTTACTTTACTGTCTTTATTAGTAGGAATATAACC |
| | TTCATATTCCTGTGGTGACCTTATGTTAAATTAGGAGGAGTACCAGAGGCTAGAAATTATGAGAT |
| | GTCCTACTTGAGCACAGGTGCAGCTAGGCAGGGCTCTCTCAATATTATTTCACCTAGCACATCTG |
| | GGAGTTACTCCAGATCTTCCCCCTCAATATTCAGCCTGGGTAGGGTTGAAATAAATTTAACCTGA |
| | GTTCACTGGATTTTTGCACTTTATCAAAATCTGTTCCAATATTCTACACTCAAATTAAAATCTAT |
| | TTTTTGATTCTCTGTGGCTTTAAGTTCATTAAATGTAAAATTGGCAGCTTGCTAAAGAAGGTCAG |
| | ACTGATTAACTGTTTAAGACTTGTACATTTTCTGCTTCAGTTTTATTAACTGGCAGCATCCTGGA |
| | TGTTTTGTATTTTGTGATTTTTTTTTTTTTTTTGATAGAGCAAGCATAAGATTTCACAAGCAGAG |
| | ACTTACCAACTCTCTTTTCCCCTTTGGAAGCTTAAAAAATGATAGAAGCTGGTAAAGTAGATGCT |
| | GGAGTATTTTAGTACAAAGTTAAAAAAAAAAGCAAACAGGAAAGAAAGACATGTCTACCTTGTTA |
| | TACCATCCGCTGGTGATTATGTGTGCAGAAATAGTCTCATAATGAAGCATTTTGGAGCTCATTCA |
| | GAAAATTAGTCCACTTTGACAACATTAGGCGAAGTATTTCAAGTCTAAAGAAAGGACTTCTCAGC |
| | CTTGCTCTGAAATGTGGTGTTTGCTTGACCATTCTGATTTTTATATCATAGATGCCACCAAGTGC |
| | AAACATGTTTAGAATATTATAGGCATTCCATTTCTCAGAATAAAAAAAAAATGACTAATTGGCTT |
| | ATTTTCTTAAGTACTCAAAAGTATCCCATTTAGCTAATGTGTCTGAGAAATACTGCCCGTGCATT |
| | TGGTATTTCTTTGATTTTGTGGCACTGCTGAGAGTGAGAGCAGAAAGGTTTTTGGCAGTGTGAAT |
| | TATGCTGCGACATGATTATTATTTAGATCCGTTTCATAGGTGCATGCAGTCGTTTTCTTATTACA |
| | GCAGTGTAAATGTGGCACATTTTTCATGTGACATAGTAGCTTTCTAATTTATGAAGCCATGTCTG |
| | TTTACTTAGGAGTATATACATTCACACACAAAGGGTGTGTGTGTTTATTCACCTCTCCTTTCATT |
| | CTTTGGCACAATGGACAACTTGGTGTATAGGAAAAAAGAAACAAATTTGGTTTCTATCCACTTTT |
| | TTTTTTAACCAGTTTTTCTTGTAGTTATTATTTAAGCTTTCTTTATGTTCCCTGTGTTAACTATT |
| | TAAGTAGCATTCTTTCTAAACTTACAAACCAGACACATTTGTTGCTGTGGGTGTGTGCATGGGTA |
| | TATGTGTGTGTGTGTGTTCTCTGGAGTTATGCAAGGAAGACTGTTTTCTTTACATATGTGATGAT |
| | TTGCCTCATTGACAAATTTGCTCTCTGGTTGATAACCTTCACATCCTTGTACTTTTTGTATGCTC |
| | ACATTTTCTGGGTATTATATAGAGAAGCCTAGAAACACTTTACATGATGTGGTGGGATGGCATGG |
| | GGTTGAGATGTGCTTCTCCCCTTTCTGTCCTCTCTGGCACTCTAATAATTGTGCTTTTGTTTCTC |
| | CAACCACAGCCGAGCCTCTTGAAGCCATTCTTACAGATGATGAACCAGACCACGGCCCGTTGGGA |
| | GCTCCAGAAGGGGATCATGACCTCCTCACCTGTGGGCAGTGCCAGATGAACTTCCCATTGGGGGA |
| | CATTCTTATTTTTATCGAGCACAAACGGAAACAATGCAATGGCAGCCTCTGCTTAGAAAAAGCTG |
| | TGGATAAGCCACCTTCCCCTTCACCAATCGAGATGAAAAAAGCATCCAATCCCGTGGAGGTTGGC |
| | ATCCAGGTCACGCCAGAGGATGACGATTGTTTATCAACGTCATCTAGAGGAATTTGCCCCAAACA |
| | GGAACACATAGCAGGTAAATGAGAAGCAAGGAGAAAAGCTGTTTGCATGTTTTCTTTTCATTTTC |
| | AGAGGTGCTGTAGCCAAGCAGTAAGGAGTTGTGAAGTGCTTTCTCTATTACTCTATGTGACTGTC |
| | CATGACAGCCCTGTAATGTTAAAATAATCATTTCTGTTGCTTACGTCCAGAACACAGAAAAATAA |
| | ATATTTTCCACCTCACTGAATCAGATGTAGGCAGGATAGGTACACACATCAGACACCTTCTCTCT |
| | GGATCTGTCGATTTTGGATTTCTTTTCTTCCCCATCCCCACCTTCTCATTTTGAAGTATTGAGCT |
| | TTACTACACCTAGTCCAGCTTCCATTGTCCATTTCCAGCCTTGGTGACGTGTCAGAGGCAAAGTG |
| | GCCATATAGGCATTTGCAGTTCAGCCAATGACTTGTTTGACTCAGAACATCTGGCCAGGCCTCCT |
| | TAGGGGTTCAGCTCGTTCTCAAGGCTTCCCTGAAGTAGAGTGGGCTGGCAGGGTAGTTGGAGGTG |
| | GTGGAAAGAGTTAACTGAGCTTCAGGGCTAGCCTTGGATCCATATTGGCTGTCAGCCCGGATGGG |
| | GCTGTAATTAAACACAGCCCCGTGGTGGGATGACACCATGACCTTGACTTTAAGATGCCATTTTC |
| | GACTGGCCAGGCCAGAGTAGAGAGGGCAGTTGCTGAAGCGCACAGACATGCTTACTCGAAAAGTT |
| | TAAGGGCATGTTGGAAATTTCAAAAGGTTGGTTTGACAGGAACGGCTGCTCCCTGCAGCCTGCCT |
| | CCTCAGCTAAATGATAAATGCTTCTCTGTGCTCTCTCTTGTCTCTGATGTGGTTTTGACAGATGT |
| | ATCTTGATTTTGTTTGTGGTTTACACAGCCACATGTCACCCTTACAAATGTCCAGTCCAGACTCC |
| | ACTGTTTCTGCTATAACACAATGTAAAAATTTTCTTGGAAAAATACACACACGTATTCAACAGCC |
| | CTCCCTCCTTTGGTTAATTTTAGCAGGGAGGCAGCTAGGTGTGTGGGTTTCTCGGCAGCTCAAGG |
| | GAAAAGGAATTAAAGGCTAGCAGTGGGACTTAAATTCCCTTCTCTAAGTGATAAACAGTAACACT |
| | ATATAGTGACCCTCAAAACATTTTTTGCTTGAGCATGTTAGACAAAAGTCAATGCAGATTCTGTG |
| | ATGACAGACATGCCATGCCTGTTGGTGGATCGCTTTCTTCCATCTACCTACCACCCAGCTCCCGA |
| | AAGGCAAGAGGTTTGTTCAGTTTTAGGAAAGGTAGTGCATATCATGAATTGATTCACTGGAACTT |
| | GTCTCTCCGACCTAGTTTGACCACAAAGTTGAACCATAATAGGTCAGTGGTCTAGAGGGGATTAA |
| | ATGTCATATTATTTCTCCTCTCCCCCTCTAGAATTTGATCATTAAAACCAAACATGGCATTTTCT |
| | TTCTTTTTTTAGTGCTTTCTGTGATAGCACTCAGATACTTTCCCTTTAGTGAAATGGGAAATCTG |
| | CTGCTAGGGAAGCTGCATTTGTGGAGTGTATTTCTTGAATCCACCACATTTACCTTATGTGACAT |
| | GTAGGTGAAGATTTTATCTCCCCTACCCCCCAGCAGGATGTGGGAATGACCATTTCCATGTGTTG |
| | TCTTGTGACTGGAAGGAAAATGAACAGAAGTGTAAGGCATGATTAATGAAGCAAGAGCAGGCGGA |
| | AGGGGATTTGTCGTCTTCGGAGATCCAAAGCCTTGCTAAATCACCAAATATGGAGTAACACTTGC |
| | GTGATGTAACATCGTATTTACATATCGAGCTGCTCGTTTAAAAGACAAAACACAGTGTCTGTCAA |
| | GCAAGAATTAAAACCACACTTCTTACTGAGGTCCCAAATAGGTTATTCAGTCTTAGATTAACCAG |
| | CTCAAAAATTCTGTGCCTCTGTATTTAGAGGAGGAATCTAAATGCTGGGGGGAAGGCCTTACATA |
| | TAGTTAAGACTTTTACTGCTATAGITGTGAATCTATGTAGGGAAATAAGAGATATTTGCTTGAAC |
| | TCCCTGGTTGTCTAAAGGTTCTGTTATTATTTTTTTAAAGAACAAGTATAATAGCAGAGCCTAGA |
| | GAAGCCAAAACCAAAAGCAAATTTAAAATATATTTTATAGCGCTAATAATCAATCATTTAACTGA |
| | GACGAAAAGCTCTCTAAGATGTCTAAGATATTCAATGGGCGCACAACAAGTGCTGTGACCCAGGT |
| | GAGGTAAACCTTTCGTGCATGAATAATTACAAAGTCTTGATTTCTTTCATTGTGTTTAATCACCT |
| | GTTCCCACCCTGGAACTGGCTGAACATAAATAGTGTGGTCACATCTCAAAGTGAGATGTCAGTAA |
| | CTAGAATCACGACTTCTCATAATTCACAGTAATGAATTAAGAGTTTCCTATGGTGAAGTTAACAT |
| | TCTACCATTGCACATAAATTCCGACGCTCTGGCCCTCAGGTGCCCCTGAAGCGAAGTTCTGGAAG |
| | ACGGCTGTGTGTGTACCCCCAGCCCATTTCTCTAAAGCACGTCTGCACAATTCCAAGTCTGCTTT |
| | TCTTTTTATGATGAGGAAGGAAACAATAACAGTAATCATTCAGTAGATATTTGAATTGTGTCACA |
| | AAAAGAAAGGAGAAGCAATGCCTTGTATTAAGGAAAGAGATATATTGATGAATCTCTAGAAGAAT |
| | GTGTTTGGCAACCACATAAAAGGTAGTCATTTAAGCGTGCTGGGTAGGAAAGGCTTTATTAAAGT |
| | GATGTAAGTTGGATTTGAGTTCACTGTGAGCCTGTACTATTTTATAGGCAGGAAGCAAGAATAAA |
| | ACAGTGACAGATCTTCTTCCTAAGATAAATAAAGCTTAGAATTCGGGACTTTCAGATAGGAGAAT |
| | AAGGCAGAGTTCTTTAAATCTTGAGTAAAATGGTATGCATTTTCACTGTACTCAGGCCTCTCCAA |
| | GCTGAGTTTTTTTTTTTTTTTTTTTTTTTTAGACAGAGTTTTGCTCTTGTTGCCCAGGCTGGAGT |
| | GCAGTGGCATGATTTTGGCTCACTGCAACCTCTGCCTCCTAGGTTCAAGCGATTCTCCTGCCTCA |
| | GCCTCCCAAGTAGCTGGGATTACAGGCGTGTGCCACTACGCCCAGCTAGTTTTTTGTATTTTCAG |
| | TAGAGGCAGGGTTTCACCATGTTGGCCAGGCTGGTCTTGAACTCCTGACCTCAGGTGATCCACCT |
| | GGCTTGGCCTCCCAAAGTGCTGGGATTACAGGCTTGAGCGACCGCACCTGGCCCAAACTGAGTAT |
| | TTTTTAGAGGATTCTTTTTACCTGGTGAATAGATGGGTATGTGCTCCCCCACTTCATCCACGTAC |
| | ACATATGAGCTGTACACATAGATGTTAATCAGGTTGCTTTTTTCATTTTATTTAAATATTCAAAA |
| | TATTGTGTGATTGTGATCCATTGAGATCATTGAAGTAGTATTAATTTAGCTGGGAATTAGCAGCT |
| | TATGTTGTGTGGGCCCAGTTCATCAATATGTGTGTCAAATATCCACCCTCAGATATCAGCAGCCT |
| | TTGACTTGCAGTCAGAGCTTTCAATAGGGGTTTTGTTTTGTTTTGTTTTCTTTTTTTTTAGTCTC |
| | ATATTTTATGATGGGGGGAAATATTCATGGAAGATTACTGAATGTGAAACTGCTGTTCCCTTATA |
| | GAAAAGACCCAAACATTATCCCATCATGTCAGATTTGAGGTTTTGGCTTATTGCACATAGGAATC |
| | TTTAAATTAGGTTTGGGCTGTCATAAAGTTAGCTTTTTGAGAGACTAGAGAAAAAATATGACAAG |
| | TCCTATAAAATGTAGTAAAGTCTGCTCCTGTTGATATATAACATTTTTTCTCTTTAAAATCATGA |
| | ACATAGACATTTATATCAGGGTATTTAAAATTATTTGCCTAGACAGTATAGCTGGTATTTAGATA |
| | ATGATATATCAGACAGATACTCTAAAGAAGGGAGATATAGTAATTCAAAATGGAAATACATTAGC |
| | ATGCTCTTAAAAGTAAATCAAATACAATATGCTTTTCAGAATTTAGAAAATGAACTTACCTTTTC |
| | TTTTTGTATCCATTCTGATTCTCTCCTAGCTCAGACTGAACTGGAGGATGTATTTGTGTACCTTA |
| | TGGTGTAATTGTAAATGAGACTATAAATTATAGTATGCTATTATGACTACTTATTTTTCTTTTCT |
| | CTTTATTTATGTGATTCTGAATAAAAACGACTGACTTCTGAAGTGAATTTTCAGCATGGCAGTTA |
| | AAACAAAAAAACACCACTACCACAAAAAACAATATACTGGTGAACATTTTACTTACCTTCAAAAT |
| | CCAGAGAGTAGAGAATATTGTTTTCTAATAAGTACCTAGGATTTTCATAGGGAGCCTATGTTTGT |
| | GAGGCCACTATCCAAAGACTAATGTTCATGAAACTGGGAGTCCTATATACAAGCTGTATTTGTAA |
| | ATAAGACAGAGAAAGGTTGTGAACTGGCAGCTTGGATGTTTTGTCAAAGTACAATGTCAGAGAAA |
| | CTCTTTCTAAGACAAATTGTAAATAGAACTGTCACAGTGATTGCATGATTGAGCCGCAGAAGTGT |
| | CCTACAATTGTTGGCATTGTCAGGACTTTTGAAAGCTTAATTAAACACAGTGGCCCGCATGGCTG |
| | CTAAACTTACTAAGGAAAGCCAAAAGGAAAAAAAAAATATATCTAAAATGTAGAAGATCCTAAAG |
| | ATCCCAAACTTCTTCAGACATTACCCTTGTGGTGACACAGAAAAGATGCATTGTGCATTTTCCTA |
| | GTCATCTTTTATAAATAATGTTTTGAGAATAGGTCCACGTGATATGAAGATCATCCTGTGTGTGA |
| | TGTGGAGATTGTGTTAGTTTTTCTGTCTCCTGCTGTTACAGACAGTTAATGTAAAAATGGCCTTT |
| | TATTGGAAACACAAATATGTATTCACTTCAAGAACAGGAGCAGAGGGGGACAAAGTTTCCCTCCC |
| | GTTCTCTGTGTTTATTCTGTGAAAGCTTAAAAAAACAAAAAAACAAAATAACCACACACACACAC |
| | ACACACACACACACACACACACACACACACACAAAACCAGTGCTGTAATTTCTTAAATCACCCCA |
| | TTCCTTGTTGTGTTGCAAGTIGTGCCTTTACTATAAAGGATCTGAAATATGTTTTGCACACCTTT |
| | CTCTTAGTGAATGTGGCATATAATTGTGGAGCTGCACATGGGCTGGAAAATGCAACTGGGTGTAG |
| | AAACGTGCAGGCAGGGTCAGGACAGGCAACCTTCAGCTCAGGGAGGAGGCGAGTTGGATGCTTAT |
| | TAATGGCATCTTTTAGAGTCCTGGAAAATCATTAATTTCACACTGCAGCTTCCATGTAGTTTGGC |
| | TAATGTGGGAGTACTAAATTGGGGTACATAAAAAACATGCAAATCCTAGGGAAACATTTTTTAGA |
| | TTTTTGTGATTTCTCAATGAAAATGTTTAATAAAGGAGAATAGGTGAATGGTGGCTTTGCGTGCT |
| | GGTCAGTAAGAAAGGAAACAAATTTTGGCTTTCCTTTGGGGGGAAATATTAAATTTAACCGAAGT |
| | AGAAAGCACAGCTAGGGAGATGCACCAAGATTGCGTCACTGGATGTTAATTTAATCTACTTTGGT |
| | TGGTCTGTTCACACCCTTTATTGCACAAAGAAGTCATTTGACAAAATTTACCCCAAGCCCAAGTC |
| | TGTTTTTACATACAGTAGTACCAGCTTTGTGCAATAAAAAGCACTTAGCATCAAGCTGGACCCAG |
| | CCTGGCACCTTGCCACTTTTTTAGCATGAGATTTAATCACCAAGCATCTTTAGTACCTTTCTGCT |
| | TGTTCAGATTTCATTTGGGTCATGGCTATGTCAGCAGTGTTGTTATTTCAAGGATTAAAAAAAAA |
| | GATTCTAACTTAGAGCCCACTTTTAACATTATTTCAAATCAAGCAGGTTTTTATGTTATGTATCA |
| | ATTTGGATGACATTAATGAAGTTCATAAAATATGTTCAGACTATATAATTTAATGGATAATGACT |
| | ACTATTTTTATTTGTAATACAAATAGGAAATTGACTGTTGTCTCCCTCCCTCCTTGGTTCTTTTC |
| | TCCTACCTAGGTAAATGGGCATCCTTAAACAGCTTCTCCCCTTTACGACCAGGGTATAGAGCACT |
| | GGCCAATATCAGTAAATTTACCTTTGTAATTTGCCACGTAGTTTTTACAACATGACCTAATTAAT |
| | TTGAGCACGAACCATATTATTGCTACTGGAGTCATTTTCTGTCACAAACTTAATTTCCAGGAAAT |
| | GTAACCTGACAAATAAGAATTCTTTAGCTCTCTACATGTGCTCCTAGAGACCAAAGGCAGATTTA |
| | AAATAATAATAATTTTAAAAGTGCCAGCATTATTAAAGCCAGTATACTTGATGCCAAACTCAATT |
| | TGAAGCCAGTAAACATCAGACTGTATTTCTAATCAGTTTTAAAATGTAACTTATTCCATATTGGG |
| | TTCATTGGAATTTGTCTCCCTGCTTTTTACTGGCCAGCTGCACTCCCTATGCATTTTTAAAACAT |
| | TTCAGCAAAGGCTTTTGCTGTTCTTAGCAGGGTTAGTAACTTGGGGTCTATTTCTGAGCTCATTC |
| | GTCATTCTGCAATGGCATTGAGTTAGGTTGGCAAGGGAAGGATTTGAGGCATGGGGGGTGGTGAG |
| | GTCACTTCTGATCCCAGCAGGGAATAGGTGAGCTTCATTTGCCTTTACAATAGGCGCACAGTTAC |
| | TGCACCTTGGAGGAGCTCTCAGGTGCCGCTCAGATGGGCGCATGTAAATGCCCTGTCAGATGCGG |
| | AGCTGGAATATTAATGCTTCTTCCACCACCACACCATAATAAAGCTGTACACAGCAAGCTTAATA |
| | TGCAGCTAGTCTGGGGAATTGTATAAACTTAGATAGCCCAGTGTGAAAGACAGCAATGGAAAAAT |
| | GCTCGATATGCCACAGTTTCCATTCTTGTTCTCCTTTGATCTATAGCGAAATGAAAACATCATCC |
| | TTTTCTTCTCTTGGAGTTGTCTCCCCAACTCTGCCACCTCCCAATTCACCACCAGAATTTTTTTG |
| | CATGTGCTGGTATGGAGAAATGCAACATAATTTGTTTCATATGGTTAATTACAGGCGTTTGAATA |
| | TTTAAAATTTTAAATAGCCACAGTTCCAGCTTTTCCCGTTAAAAGTATGTGATTTGAACAAAGGG |
| | AGTACAGTGTAAATATTTGTGGTGATTTGCAACACCCCTCTTTCCCCATTACACACACACACACA |
| | CACACACACACACACACACACACACACACAGAGAGAGAGAGAGAGAGAGACATTCAGTTTAAATC |
| | TAGTACTGATCTAAAGGACTTCTGTACCTTCATTTGTACTTTTTTTAAAAAACAACTTTCAACTG |
| | GAATTCCATTAAAATATTTCACCATTATATTTTTGAGTCCACATTGCTTGAGGTTTTAAAGAAGA |
| | TTTTTATAATGTGTTCCTTTAACAGAATCAACAGCTGTCAGAAGCAGTTGTGGTAGATCCACAAA |
| | ACGTATAAAGAAAAATACACGTTTCCTGAAACAAAACACTTGGAAAAATAAGCTGCTAAGAACTG |
| | GCGAATTAGAAGTTTGCAGACAGGGAACTGAAGTGTCATCTCTTGGTTCACCCTGGAGACTGATG |
| | TGAGTGGATCTGATGCAATGCTGCTGGAAGATTTACCTGCACAGGTTGCTCCTCTAAGGCAACGC |
| | GCAGTGCACGATTGACGTATGCACCAGAGCTAGGCTGGGCCTCAGCTCGCTCCATCTTTTGCCCT |
| | TTTTGATCTCTTTAGATAGATAAAATACCAAGTTCTCAGAGTGCTAAACAACAAATTATATATAC |
| | CTAAAGGTGAGATGATCAGGTTTAAACTTCCTGTAAAAGAGGCGAGAAGGCGCCTTGCACACCCT |
| | TTTCCAGATAGGGCTGGCAGCATGTTATTCAGAACTGAATCAGTCTCTGCCAGAGAATTCCCAGT |
| | GGGAACCTGGAGCAGGTATGTTGATGAAGGGGATACCTGGGGACCTTTGGTCACTCACAATGAGT |
| | TTTTGTTTGTATTCTCACTGTTGTTAGCATTGCCAATGAACAATTGCACCTACAATTTGATTTTA |
| | GTTTTAGATAGAGGCGAATCCACTGATTAAAAACTCCCATTAAAATAAAGAATGGAATTATTGTG |
| | AAACCTGCAAGGGTGCCTTCAAAAAGAAAACCAGTGCTGTTGTATACCTACCTCGCCTTTCTATT |
| | TGCTTTTTGAACTTTCTAAAAAACACAAGGAAGCTTTTTGCTAAGCATCAGGGCATTTAAATTTA |
| | TATTCATCAGTTGTTCATTTTCTTAATATGTAATGATGCATAAAAAGGCTGCAAGGAAATCACAT |
| | CTGTTAATTTTTAGGGAAATAAAGTGTAGCTTGGATTCTTATGTTGGAGCACAAAGCACTATGTG |
| | CCAAGTCTGTTCCTGTACATTTTAAATATAGAGTTTTAATATTTGGCCAATCCCTGCACCTCCTC |
| | AAACAAAAACAAACCTCAAAAAACTAAGAGAACCAAACCTGAAGTATTCTCCTTCACCAACTCAA |
| | GGTATACCATGATTTTATGATTTATTTACATTTAGGGGGGAACCCCTCAGTGAACCATTTACTCC |
| | CCATTTTAACTCCCCTGCCCCGATCCTTTCAGTTTCCAGTTAAAACAATGCATTAACCAATGTTA |
| | AATCTTAAATCTCGTGAGTTTCTCTCCATCACACCCTAATATTTTAAAAAAATTATTCCTTTACA |
| | TTTAAAACTGAACATTGGCTACTGAAGAATGATTTAAAGGCTGAAAAAAATTTTAATAATAAATC |
| | GTAACCTTCTCATGTTATGTTTTTGTTATGTTAAGGAGAAAAAAATCAATAAGGAAAAATTTAAT |
| | TCTGATAAAGATACTCTTGGATCTTTGAAAACAACTGCTGTCCTTTTAACTAAAACATTTGAGCA |
| | GCTTCAAAGACTATGTATTTCTTCTGATCTTGGAGCTGTGTGACTGGTAGCAAGAAAGAAAAAAA |
| | ATCTTATTCTACATACAAGTGGATTGCTTAACAAGTCAGCACAGACACGTACTTGTTTGTACAAT |
| | AGAGATAAAAATTCCTGTATAAAAATAATTCAGCTGCTGACAGCAGGCATTGTTGTTGGACCTGT |
| | CTTTTGTGCTTGTCCCAGCTCTGGGTCCCCCTCCCCTCCTATCTGCTTGGGGCAGCCTGCTGCCT |
| | GCACACTGCTGACCAGAAGTTAATTGCTATATATTAAGTATATAGGTATTGTATTTAAAGAGGAA |
| | TATCTCAAGGCTTCCTATATGCATTCCACTTTACTTTCTGATGTGATTGCGGTGTTGCCAGCAGG |
| | GGGGTGGCAGGCAAACGCTCTAATAGGGAAAATCACTTGAAGGCAGTTAGGGGAAATTTGGCCTT |
| | CAAGTCCCATTTGCTCTGTAGTGTAGCATTGGTTTCTAAACTTTTGTTTTTAATCTAATTCTGAT |
| | TTGCCCTGTCACATCCCATATCAACCCTCATTGAACTCTACTCATGTAGAGTAACATTAGTGTCA |
| | AACGGAATTGGTCAGGACTGTGGACCTGTGGCTCATACAGATGGTTGTGGATGTGGGTTCCATGC |
| | AGCTCTGCATCCTATCCTTTCTAATAAATGTTAAAATGTGGCACATTTCTGAGCAGGGCCCAAGG |
| | ATAAGAGAGTTAAGAAATCAGGGGGTAGTACCTGAGATTTTTCTCCCTTCTCTTTCCGATTTCCT |
| | TGATAACATCCACATTTCCGGTAAGATCAACTCTAGGAGAAAGTCTGAGGCTGGGGGAGAGAGGG |
| | GGAGAAGGGTGCGGAGAGAGGTTCTTGGAATATTCTTCGATAGCAGTTCAAATGAAATCCCCACA |
| | GCAGAGAGCTTTTGGGTCTAGCAGTGGAGCGGTAAGCTGGGACACGTGGCCTTTCGAAGCTGTTA |
| | TTCTCAGTCTGACTTGCACACCAGCTGAGATAGGACTTAACATATACTTTCTTGCTTTCACCTGG |
| | GTTGGAGAGGTTGGGGTTGGGAGGAAGAGGAGGAGTTCATTGGGAATTCTGTCACTAGAATTTTT |
| | TAAATGTCAGGAGGTTAGCAAGGTGTGAGTTAGCATTCAAGCAAAGGATTCTTCTCCAGACTAGT |
| | AATTGGAAAGCCTGCAAATCCAGGTTCCCACGATACTCTCTAATAACTGGGGTGGGATGGTGGTG |
| | GTGGGTGGACACCACAACTTTCTGAATGTCAGCTGATGTCTGCATGACCCGTTCACCATGGATTA |
| | AATGCGGCTGGTGCCGAATGGAGGAAATCAGAAAGGCAAATCTCAAGCAACAGGATTTGCACTCC |
| | TCAGAAGTAAACCAGACCTTGCTCCTCTCCCTCCTGTGCTTCTCCTTTCTTGCTGGTTTCCCTTT |
| | GGAAGCAGAAACTTCTAAAATTAATGCCACTCCAAGCCAATGAAAAAGCTGTTTTTATACCACAG |
| | TGGATGTTTACACAGGAGAGACAACTTGAGGGGGAAAAGGCTTTTTGGAAGGGTGGAGGGACTCG |
| | TGTTAATCTGTTCTGTTGGAGGACTATGCAGTATTGCCTATGAGCGACTCTGGGCTGTTTTTGAT |
| | AAATTACCATGTTTAGAGATAGGTTTGGCTCTTAAGGGCTTAGTTTTATGAACAAAGTCCGTGAC |
| | GATGTTTGCAGCCTCTGTTTGTATCTTAGCCCCTTTGGCTTGACTAGAAGCTCTATGTTTAGTTT |
| | AAGCTCAGTCTGGAAGATATTACAATTTTGCATTAAAAAAATGAGGAAATCATAGGAAGAAAAAC |
| | CCTTTGCTTTTTGGATGAATCTTACTGATAATTTGCTAAAGCTCATTTGAATTTTAAGCACTTCT |
| | TTAATCTTCAAAGGCTAAATTGCTTTATGAATATGCATGGTGTGGGCAGACTTCAGTTCATTACC |
| | TAGTTGTAAATTCTAATGACCATTAGGTCCTTCCAGTAATTGCGAATTGTTTTGCATTTTTGATT |
| | GGCCTATTAACATGTACATTCGGTGCACATCAGGCTGGCCTGTCAGCCTGCTGAAGGAGAAAAAA |
| | AAGGTGAAAATTGTTTATAGCACCAAGATTCTTAGATTTTCAATCTTGCAAAATTGATGATGTAA |
| | AAAAATTAAAGCAGTGTTTTTTCTTCTCAAGATTAAAAGTTCACCAAGAGATTTGACATATTTAA |
| | TTTACATGATGACTTTGCACTCCTTCATTAATGTAATTTGCATATGAAGCTGTTGTTAATCACTT |
| | TTGATCATGTTTTGTGTATTAGCTGCCTCAGTGGCTCTCCTCCTCAGATGCCCCAGTAGAAAGGA |
| | GCAAAATGATGCATCTTCTTGCCAAGTTTCCTTTAGTGAATTGAGGAATTAGAAGTCTAACCTTG |
| | AGTAATTACATATGTTTTATCCGTTTTCTTTTAACGTTAAGTACAGTTTGTGAACGTGTTGGCTG |
| | GAAATCGTTCTCATTTGGGGAGAAGACTGTAAAATTTAAGTATATGATTGAGGCACTTCCAGATA |
| | CATAGAGAAATATGTATTGCCTGTTTCTGTTCCCCACGAACATTGCAGGGCAGTTTTATTGTTAG |
| | CAGTTTGATGGCAGGAAGCCTTGGCTATTATAGTGTATTAAGACATCAGGTTCCTCCTTTGGAGG |
| | AGGGAAGGCTACAGAACTACAAACCTTTCTAACAATGCTTTAGGTTTCTTCTTTAGATAGATGGC |
| | TGGCACCTAAAGGACTTGGGCCTGGGTTTGGCTGACTCTTTTATCTTTTAGATCAAGTAAGTTTT |
| | CTCATTCAGCTGCTGCTCTGAGCTACAATGTGTCCTCCCCTCATCACCAAAGTATATCCTGGTCT |
| | CCAGGCTCCCTGGGCTCCCAGTGTCTCCCTCAAGGTACACGAGTGCCCTGGTGGTGAAAACAAGG |
| | TGCTAACTAACGGTTTCCGATTTTTGAGAGCCTGTGATTTTGGTGTTTGCCTTTGCTGTTGAATA |
| | ACCTGTGCTGTATTATTGATGTTCATCTTTGGTTTATGAGTTTATCACTGGTTAACAAGCAGAAT |
| | CAGAACAGTGTAACTGATATTCTGATTAAAACGAATGTTTAATGAAAGAAAATAAATTGTGATGG |
| | AAAATGAACAGTGTGTAAGAAACATAACTATAATTTTAACCTCCGAGGGACCTAGCACTGCCCTA |
| | CCGTGACTTCCATCCATACCATGCTAAAAGCATGCTTCAGTTTAAAGTTGTTAATATTCAGCTGG |
| | GAAACAGTATCCAGAACACAAATAAATTATTAAGTGCATGAACTTTTTAGGCAGTAAGATGAACT |
| | GATGGGGTCCATCTGTGAGATCCAGGGGCTTTTTATTTGTGTGTGTCGAGCGATTCTGCCCTCTC |
| | CGACTTCACAGCCTTTGGTCTCCGGCCAACTGCATGCATAATTGATTCCACACGCACTATCATTT |
| | TCTTGATGTAATTGCTTTACTAAGATATGATGAAATCTAATGGATAATTTGCTATTTGAAAATGG |
| | TCAAAAAAAATCTTCATACTTTATGTGGGGCTGAGTGGGCAGTGGAGAAAGGGGTATTCAGCTGA |
| | CCCGGTATTTAAGAAAACAAAACAAGCAACACTAACTTATGCATGCTGCTTCAGTCGCGTTGGCT |
| | GTGGATAGGAAGGTCTTTGTGACATATGGAAGCCAGTGTATAAATCTCTCTCCTTCTATCTTGCA |
| | TCACCCCCTTCATTCCTTCTCTCTTTCTCTCCTCTCTCTCTCCCCCAAACTTTACAAGAAAGGGA |
| | TCCTAACAAGGTAAAAAGTAAACAATTTAGTCATCACAAGCCTTATTATTCAGTCTATCCAGGAG |
| | TTTTGCCATGTCGGTTTATTTAACTTCCAGGAATGTAAACACTGACACAGCCCTAGAAGCAGCAA |
| | GAAAGATTACAGTATTAGAGTTAAAAACGTGAGCATGGAGGAGCTGTGCTTTATACTCTGCTATA |
| | ATAACACTTTACATTGAAACATAATGGTAAGTCAAAAGTGACTGGAAACTTCTGCTTATATGGAG |
| | TACAAATTTCATTCTAATAGATTGGCATAATCTAGTGTACCCAGGGTAGATTGTTATATAATGGA |
| | GAAACTGTATAAATGTCAAGTACACAAATAATTCTACAGGAAGTAAATAAAAAGTATTAGAATTT |
| | CTTAAGTCACCATTAAATTTTGGTGGTGGGACAATCTCATTAGCTCCTTCAAAATCATGTGGCTT |
| | TGCATAAGTCTTTTGAAAATGTATTTTCAGGGAATTTACAGATGGTGAAACATTGTTTTAATCCA |
| | AACCAGTTAATGCTTTAAATCTACCTTTAAAAAAATTGTACTGTTTTTCGAAGTACTTAAAGGGA |
| | GTGGAGGGGTAGAAAGCATATAAGTGAATCCATCTCACTGTGGCAAACTGTTTTTCAAGTAAAGT |
| | CATAATAATGAACAACACATGATCTGAAATTTGATCAGCAAACATATCCTTATGCCAAGGAATTT |
| | TCTTTTTTTCTTTCCTTTTTTTTCTTTTTCGCCATTCACATACCAAGGTTCTGTAAATCAGTAAA |
| | CCAGGCAGAGAGTAACTATTGTAAGGGGGAAACCAAATCATAATACCCAGAGTGGCCCAGAAGCT |
| | GTCTTTCTGAAGAAACATTAACGCCACCACCACCAAAAAAAGAAAAACAAAAAAACAAAAAACAA |
| | AGCAAAACAAAACAAAACCTTTTTAAAAAACTGGAAATGACAGAATAGTTTTAAAAGGAAAAAAA |
| | AAAAAACCCAAAAACCAAAAAGCAACAACCACCTTCTGACGCTCAAAACTTCAAACTATTAATAG |
| | ACCACCAGTGAGATAGACTGTCTTTGTGCCTTGAAATGCAAAATGAGGGAAATAATTAGCAGAGG |
| | AACAAAATTCTCAAAATTTGAAGAACTTCTGTGATTACTGGGGGTACAGTGAAAAGAAAATGCAA |
| | ATTTCTTCCTGATCTTAATTAGATTCGATTGTGCGGTGGGTGTGTTGGATTTGGGGGGAGGGGCA |
| | GAGGCAGGGAGTGCTGGGGTGAGGCGTGAGGCTGAGTGTTGTGGAGACAGGTTAGCAGGGGCCCG |
| | GCGGTGTGGCAGGAACAAAGGCAGCTTCCAACGCTGGTGCAGGATTCCGAGCCTTAACCCAGATG |
| | CTCATGGTGCCCTAGTCTTGAGTTCTTCATTTAGGTGGGCTTATTTCCCACTGGGTCTGGGGGAT |
| | TTCATTTGTCCTTTGAGGGGCAGGGTGGACACTGACAGAACAGCTGCGGCCGGCAGAGAGGGTGG |
| | TTAGGAAGAGGGAAGCAGCCTGTGGGTAACTTCCCGACCACATGGAAAGGCTGAATAAGACGTTA |
| | TGGACCCTGCCTTGGGTACTGGGGTCAGCGTCTCCTGGTGGTGTCTGCACAGGGCCCCCCAATGC |
| | CAGGGCACTGCCAAAACACGCTCTTGAGTTTAATGGTAGTGGTTGGTCTGAGTCCTGCCAAAGTG |
| | TATGGAGCAAGTTTCATTGGCTGGACTTTCCCCTTGCATGAAATAATAAAAGCCCTGGCCAAGGC |
| | TTATGAATCTATTTTTGTTTCATTAATATTATTTATTATGTATTTTATTAATATTTTTTGGAGGG |
| | ACCTTGCTCTCATTTGACCATTTGTAGTTATAATTAATGCATTCCGTACTGGTTGTAAAAAGTGT |
| | GCTTGCATTTAATTGCAAGTCAGGGTAAATTAATGGATATGATTTAAAACAAAACTCACTTAAAA |
| | TATTCTTGCAGAACGCAAAGGAGGGGGCAGTCCCAGTATTTAATTTATTTTCTGGTTTAGTGTTA |
| | GTGTGAGAGGGTCGAAAAGATTCTGTGGGTCCAACGGGATTTGTGTCTGTGTGTGCAGGACCGTC |
| | GGGCAACACAGAGGGAGGAGAAAAACCTGGACCGGAGTAGGGTAGCCAGGAGCTCTTTTTTTTTT |
| | TTTCTCTAATTTCTGAGGTTGCCAGGAGGGGCTTAAGCAAAGTGGTCAAGTCCATCTGCTCCGGA |
| | GAAGGTGGTAAAGAAAAGAGGTTAGTGGCAAGAGGGAAGGAGCACAAAGGGAAAATTGTACATTG |
| | GGAGCGTTACTCTCCCTGGCCATGGTGTAGCCAGACTGGTTTAGCAGACAGAATGATAGATTGTT |
| | TTGTCAGGGGTCCCAGGGTGCGCCCTGAACTTGAAGCACTTTGTTTATCTTGAATAGAAAGGGAA |
| | AAGCGCAGACATAATCGATGTCTAGTTTTTAGGAGCTCGAAAGAGGTAGGAGAACAGAGAAGACT |
| | CAGGAGGGGTAGTGGGAGGTGGGGGAGGTGCAGGCCCTGGTTGTGGTTGTCCATTAACAGATGAA |
| | CTTGGCCGAGGGCCAGGCTTTAGATGAGAGCGTGTCAGGGCCCCAGTGCAGCCAAGCCTTTTCAG |
| | TGTTTTTTTTTTCCTTTTTCTTTCTTTCTTTTTTAAATACCTGCTGACTGTACATCAAATGCTCC |
| | CTGGTCTTTTGGCTAAAGGCAAAAAAATAAAAAATAAAAAAAAAAAGAGACGCACAGCTCAATTT |
| | TTTCCCTCCTCTGAACCAGTTGAGGCCAGTCTTTTGGCTACATATGCGGGTTCTATCATCTTTCC |
| | TGGCTTGCCGTTGGGAAAAAAAGTTGTGATAACGCCAGTAACCCGAGGGCCAGATGGGAAGGGTT |
| | TGGTTGTGTTCAGGCGACCAGGTGTGAGAGCTCGTGGTGCAGTGGGGTGGGGCGTGGCCGGCGTG |
| | CCTGCGTGTGCAGGTAAGAAATCAGTGGAAACTCTTTTTTTTTTTTTTTTTTAAATGGCTGAAGT |
| | TTAACTTGTTGGAAGGGCCTGTGAATTAAGCTGTCGGTGGCTGAGAACGATAATATGCAAGGAAG |
| | GCTCAAGGAAGGCTCAAGAAAGGCCAGGGGTGGGGAAAAGGTGCTCTTGTTAGAGGCGCAGCCTT |
| | TCCTGGGCAGGACCCAGGACCGATGGCAAACCCATGTGTTTGGGCTTGTTTTGTTCTCGATTTTC |
| | TTATCTTCTTGGCCTCTTCCTGTGTTTTTTAGTTTATTGTGACATTATGCATTCATATATGAATG |
| | TTGGCAAGCAGGAGTCATCATCCCAATAACTTCCTGACATTTTTAGCTCTTTTAATGTGCAGTCT |
| | TTGCCCTCCTGCCACAAGTGGCGAAGTAATTGAATTTCCCTGTTACTAACTGGCAGGAGGCATGT |
| | TCTAGTTCCCACCAGAGGAGCTGCTGGGGCTAAAGCTGGGTTCATAGAATCCCACCTAGGGGACA |
| | CCAGGGCTTTCAAGTGGTTTGGGGACCTGTCTGAAATGATATTCACACAATAAAAAATATTTTTC |
| | CCATCATAGACTTGAAAAGGCACCATTGTGCACATCTATATAAAATGTGATAAAATCACATTTAC |
| | TTCCCCTGGCTAGGCCTCATAAGGGAGGCAGGATTTCCTTCTCCTTTTCTAGTAGCAAATAAAAA |
| | CTGGGAAAATTTGGGGGCCTCTGGGTTTATCCCATGGATACCTGCCCCCGCTCCCGCCCGCCAAC |
| | TCAGCCAAGCCCTTAGAGGCAGTCTTCTCTCCCACCTAGATGTCTTTGTAACCTGAGCTGGTAAG |
| | AAAGGGAGGAGGGACAGAAAGAGGGGAAATATGCCCTTGACATATGATGTATCTTCTTTCTTTTC |
| | TTCTTCTCTTTGATTACACGAAATAAAATGGTTTAGGCTGAGGGTAAAGAAGTAATACCATTTCT |
| | AGTTGTGCAACCTTGGGCAGATTTCATTCCCTAAGCCTCCGCTTCCTCAATCTGTAAAGTGGGGA |
| | GAATCACGGGGCTTGCCTCATAGGGCCTTTGAGCATCCTATGAGAGCATGTGGGGGCGCTGGGCT |
| | CAGTGCTGGGCACATGGTAAAACATGTCACAAAAGCTCATTACTATTACGGTTATGACTCATGGC |
| | TTGGAACTGTGTGCTCCTGGGGTCTCAAAGTAGTTCCCCCATTATGGGGTGAGCAGGTTGGGATG |
| | AGAGAAGAGCAGGGCAGGTGGGGGTCTAAAGAGCTCAGGGTCTCATTATGTTTCTGGTGGCAGCT |
| | CCCTCGTGGGTGGGAGTCCCCTCTCCCCATAGACGTGTGTTGCCTTACGAGAGGCTTGTGCCTGC |
| | CTGGGTGTGTGACACAGTTACTCTGGGTTCAGATTTCTATGTTACTGCTAGCTGGTTGGGAGAGT |
| | CTGAGGGAATCATTTCACCTCTCTGTGAAATGGAGATAACTCAAGGTCCCTTACCTCATAGAGTC |
| | CATGTGAGAAGTAAATGAGGGAAAGCACAGACATTACTCGCTCCGGGGGCTGCACCTCCAGAATT |
| | GCTGTTGTCATTATTACCATGTGTCTGACACATTGATATTCCATCCCACAACAACCTCGGAAAGG |
| | AAACACTCCCATTAGCCTCATTTGGTAGAGGAGGAAATTGGGGTTCATCAAGGGTTAAATGACTT |
| | CCCTGAGGGTCCACAGTTGTTCAATCCTTTGGCCTGCGGCCGCCACCCTCTGCTACCTCTTCAGT |
| | ACGTTTGCAGCTTTCTTCAGCGGTGCCAGGCAACAACTGGGCAGGAAGCTCTGGTGCTGGACAGT |
| | TGTCCCTCCCATGGGTTCTGTGGTCAAGTTTTTCAATCTTCTGGGAAAGAGAAGAATGTTCCCCT |
| | CCAGTTCTGGGCATATTGAAGGAGCACGGAGCTGTTGGGAAAAGTTGCAATGTAAGGAATCCTGC |
| | TTTGCAAGTAGTCATTTCCCCATCTGTCCAGAATGAGCCTGAAATCAAGTGAGGGTCCTGAGAAA |
| | CAGAGGGAGGAGGTTTTACTGTTTGTGTGTGGCTTGGTCAGGAGACTGCAGTGGGCTGAATGAGA |
| | AACTAAGCTCGGACTTTTAAGAAGTGGTGAGGCTTGGCCTGCAGCAGTTCTGTGTGTTGTCTCTG |
| | TGGCATTTACTTCTCGGATCGTACCTTCAAAGGCTGGGGAGAATCAGAATTATACAGGGAGGGAG |
| | AGACTGAGTGTGAGTGAGTGTGCGTGGCAGTGGTGTTTCTTAGGACGATGGGTTCTGGGGGGTCA |
| | TAATCTGCTTCGAGGAGGTTTTCATTTCTGGCTGAACAAGGCTGTGGTAAGGCAAGTCCGGAAGG |
| | CATGCTGGAAACTTGAGGGAAGTTTTGAATGGAAACTGCAGTCAACAGCTCCATATGATCCGCAT |
| | GTGGCTTCCCCAGAGGCAAGTTTTCAGCTGCGTGGTGGCCTCTCCCAGTCACTCCACAGGCTGCC |
| | CTGACGCTATTAATATTTGCTGAAGCAAGACCTGAGGTTCGTTGCAGATGGATTACACAATGTAT |
| | TCCAAAACCAAATGTTACTGTTTTCCTGTATTCTCCATCCTTTCAAATTGGCCAGGCTAACATAG |
| | ACCTCCACTGAGAGAATTTCAGAATCATTTGGTAGTTGAGAAGCGCCTACTTCATGCGGAGGCCC |
| | CGTGGGAGGAGTGGAAGAGTTGGCCTCAGCACTGGCGAGTATCGGATGGGAGCTCTGCTCACTTG |
| | GTAAGTCCTTCTGCTAGAACCAAGGGAGGCTGTTCAGATCCATCACAAAGAAGTTGTCGGTCACA |
| | TCCAGGTTGTCTTCTGAGTTTGAGGTGGGATGGAGGTGGCTGCTGAGAATCCATGTGGGTCAAGA |
| | GCTCCAAAGCTTCACTTTTACTTCGCACTCTGTCCCGGGGCATGGACGTCCTCAATGGAGGTCAT |
| | GCAAGCCCTTCCCCCTCACCCCTTCTCTTGGCCCTCTTCATTGTCTCTACATACCCTTGGGTCAA |
| | GAGTGTAGTGGTTCTCCCTTGTCACCCTGGAAGAGAAGCTCTTAGTTTTATTTGCTGGGTCTCCT |
| | AGACTGAAATGATAAAGCTGAAATGATAAAAGGCGTATCATGGCTTTAGAACCCTTCTTATTTCC |
| | CTCGCTCGCACCCCCTAGTTTTCCTTCTCTTCCCTTGAAAATCAGTGAAAATCAGGCCACATCTC |
| | TGATGATGGCCTTTTGTTTCTTTTTCTTTTTCTGTTTCTGCCTTCGTTAGGTAAGCACAAATTTG |
| | ATGTCCCAAGAGGCAGGCCGGTGACCCTTCAGGCCAAGTGCCTGGATGTGGCAAAGCTACAATAA |
| | ATATCGAATGGTGAGAGCAATGGAAATTTAGCAAAGCCATAACCGGGGAGACCTCAGAGGGGCAG |
| | TGGACTGGTTAAGAGGCTGTTGGATGAGCCGGGTAGTATTTCTACTTCAACCTGATTGAAATGTC |
| | GACTAAAAATCAATGCTGTTGACTAGTGATAATTTACAACGTTCCTGGTGCTAAGTAGTTCCCCG |
| | CTTAAGAATGCGTTGGCTGGGCAGAGATTAGCGCAGGGAGTTGTGTGTGTCACAATGAATCAGAC |
| | GCATTATAGGTCAGCCCTTTATTTGTTTCATCATGACTTTTACACAGTTGTCATGTAATTTATGG |
| | CTGCTTTCACGTTGTCAAACATTTTCATTGCATCTTCTTCTTTAACACCCTCCTGACATAGACAC |
| | ACTGCACTTGAAGGCTTGGTATTGTTTCATAATCCGAGAGGAGGCCTATAAACCATCAAATTACA |
| | CTATCTTTGGGCTAATCTAAATGCGCTGCAGATTAAAATCAGAGCTCATTTGTCCCTGATGCAAA |
| | TTATTAAGTTCTAATTATAAATACCCATTTAATTACCCGACACATTTTTATTTTGCGGACCCTTT |
| | TGAGCACTGCTGTCTGCGATGCAGAGGGGGTGGGGGGAGATGCATAGGAGACAATCTGCAGTAAT |
| | TAATGTACACTTCCCAAATGGTAAAGGATAAACATATGCTGCTTTGTTTGTCTTATTTATTTATT |
| | GATTAGATGTATAGAGACTTTGGCGTGGGCACAATCTGAAGTTGAAATCCTTTTAAAGATGAAAA |
| | CTATTTAAAAATCTTTTGGGGAAGAAAGAGCAAAATATAGCCAACCAATAGCTTTCTGCTAGAAC |
| | ACATCATCCCAAAATATGGGATTCTGAATTTGATCAAATCACCAGTTTCTGAATTTGATCAAATC |
| | TAGATTTTGCAGAAGTTCAGGGTGAGAGAAACCATGCCTGTTTTATATCTAGAAAGTGAAATCAT |
| | TGTTATAGAAAAAACCTACTGTGGTTAGAAAAAAACCACATTCTTTTTTCCCAGCCCTGCTGCCA |
| | TCCTCTACCAGAAAATAACAGTATCTGCCTGTAGTATGAAGACCTTCCAATTGAGAGCATTATGA |
| | TAAACTATTTTTGATTACCAAACACGAATGAAGGAAGAAGATAACATAAAAATTAGTAAAGGCCT |
| | TCCAAGTAGACATTTACCCTTCTGTGAAAGCCATGGAGAAATTACCAAGACTGGTTTGGGGGGAG |
| | GGCATTTAAGGTCTTTTGGGCATTACAGATTTTCCAGAACCAAACTTTGACTTTTAGTGTTAACA |
| | GAGAGACACTGATCTGAAAACCAGGACACCTGGGTTCTGACCCTTATTGTATCATGCTGTGAGAT |
| | TTTGGGCTCCCTTCACCTGTTAGCATTTGTTTCCTTGTCTTGTAAAGTAGGTAAAATAGATAGTT |
| | TGGACTGGGTGGGTCTCTAAGTCCCCATGATGTTCTAGCATAGTATGAACACCACTGACCAGTTT |
| | TCTCCCTGCTATTTTTTGGAATCTAGTTGCTGAATGGGGCTCACCTGCAAAGACAGCAGAATATT |
| | ATTTTCTTGATTTGCCTCAAAGATGGAAGCTATGGTGGAGATTAAGGCTTGGATTCGTGATTCCC |
| | CAACAGAAAGCTTAAAGGCATCTTTCAAATTGCTGGAAGCAAAATTGAAGTGCAGTATAATGGAA |
| | TGGTGATAATTCACAGAAGTTTCCAGCCTTATAAGATTTCTCCATCTTTTAATTGTTGCAAGCTG |
| | TTTTTTTTGAAAAACTCCAAAGAATGTAATGTGTATTTTCTCCAAGTTTGCTTTTTTGGGCAAAT |
| | GTAACTACATCAAAATAGAAGTACGTTTTTGAAAAAGAAATAGTTGAATTCAAACAACCAGGTAT |
| | TTTAAATTCAATTAACTGACTGAATTCAGTGATATTTTCCTCCTTCCTCCTCCCAAAAGCTGGTT |
| | TCTCTGTATGGACATAGCCTACATATGCTGAGTCCCTGGAGTTAGGAATTTTTGCTTGTTAAAGG |
| | CATCCGATGCAACATGTTTAGAAGAACTCTCCCTCTGTTAGTGTTGAAGACAGCATAAATTGAGG |
| | GAAAATGTTCTTTTTTTATTCATCATGTAGGTAAAAGCATATGGCCTGTTCTGGGACATGCGATC |
| | TTTGCAATCCATTTTTTAAACTTGGTGTTTACCATTGGCTTTTAGCACGGATGTTTCTGTTTTCC |
| | ACACTGTCCAGCAAATACCATTTATATGTGGCATTGAATGAGATATGAAATGTTTTCAGAAGCAT |
| | GCTGAAAAAGGGCATTCAAAGTTATCCTTTGGATAATGATGATCTAAAACTTTCTTTTATTATCC |
| | CATGTGCTCAGAGTAAGGGGCAAATGAATCAGTTGTGAAATATGTGTTCCTTGTAGGACACAGGC |
| | ACTCTTGAGATCTATAGCTTCAATAAAAAGGTAATTTATTTAAATTACTGCCTCTTTAATTTATA |
| | ATGTTTTGGGGATTTTTAATAGGCATGCTCTGTAAGGGCACTGGTAATCAGCTGTTTCTGATTTT |
| | GCATGCTCTTCTATCTCTGGTAACAAAATAAAATCTTAAAAAACAAGAAAAAAGAAAAAAAAACA |
| | AAAACAAAAACAAGGAACATAAAGTTTAGCCCTAACCCAACCCAAAAGCAAATAACAGGCCGAAT |
| | GAATGGCAGCCCCCCAGAGGCTCTACTTTCCCCTTCCATTATTACCTGAAATAAAAGCATGATAA |
| | CATTCATGCCAGAGATAGGTGACAAAATTATGTATTCAGACATGAAGTTTAGGATTTCATAGCCC |
| | AATGTTCTCTCTTCTCCCCCACCTCTTATTGTGTTGTGCAAATGTATCAGCCGTTGTATTGTTAA |
| | TGCATGATAGGAAGCTGCCGCTAGGACAGTCTTGGCTCACTAATGCGGTCAGCTGTGTCACAATG |
| | TGATATATAGATTATATTTACCATGGCATATTTTGTTTGCGAAATGGGAGCGGATGATAAATGAA |
| | GATACCCTCCAGTTTTCACACTAGITCCTGTGGTCCGGAGTCTCTCAAACAATAAAGCACCCCTG |
| | ATAATGGAGAGGTATTTATGGGAACATAATTGACTTCAAAGTTTTAGATCTCTGGCTGAAGTTTA |
| | AGATGGGATAGTCCATTACATTAATGTCTGTGCTTAAAGCTCCTATTTGGCTTAAATAAATTATT |
| | TAGGGTTTACTGCTTAAACCTTGGTCAATTCTTGAACGTTTGGGCTAGTTAAGTAATTTTCCAGT |
| | GACTTTCTGTGCCTTGGTGATTCATTTACTTGATTGAGCTCCTGTGTGCTCGTATGATTTCTAAA |
| | TGTATTTCTCAAGTTTTGCCTGGCAATGAATGATTTTGCTTACTGGAGTCTTGTGTGGTACACCT |
| | ATAAAAGGCTTATTAACTCTTTTTGAAAAAAAAAAAAATCCCCAAACACATCAACACTGTCATCA |
| | TAAGATAAAGCATATATACATATGCATCTATATACACACATACATATGTACATACTACATATATA |
| | CATACGTATATGCATGTATGAATATATATATAGTTGTGTGCCTGTGTGTGTGTAGAAAGGGAGAG |
| | AGAGAGAATAGGAAAGTCTTTAGAATTCACCATGATTCCATCAAATCAATATAGAAGTTTTTGAA |
| | AGCTATCCATGTAGAAACCACTTTTCATCAAAATCTGACTTAAGCAAATTATCTCCATACTATTT |
| | ATCTGAAAGTCTGTTGTTCACATAGCGCTGGATTGAGGATCATAGTGGCAAATTTAGGAGCAACA |
| | GTCCCAAGCAGGAATCCTGGATGGCAGGCTGTCCTTTGTGCCTCCCCTGAGTTGAGAAGACTGGT |
| | GTTTATTCTTTCTCTAGGTTGCAACACGTGTTGCCTTGAAATCTCCCTTCTTTACGGTTCTGCCA |
| | TGAGTGTATTTTCTGTGACCTGCCTCTGCATCTGGTTAAATGGACTTCAGTAATCTGTACACAGT |
| | TACTTCTTACTTATTTTATATCCTGAAAGATATTAAGTCCAACAAGCTTTTACCCACAGAGTCTA |
| | CAGAGAAAACGGCCAGGCAATTTTTGTTTCAATCTCTGTGTCTCTCTGGAGCACTAGTTCCAGAG |
| | GCTGATCAATAGGTTTTATTGTAGACCTCACTGTCTCTAAAAGCATTTTGACCTTATCCTGTCTA |
| | AAAATAGTATTTGCTCTTGCCTGCAGAACCTTGACCTGTGAAAACCCATTTGGAACATAACTGAC |
| | ATATCTAGTCAGCTGTATATCCAAGACATGCTCTGTGAATGAATTCTGTGCAGAACCGTCCAGGA |
| | GAACACTTTCTTCCAAGACAAATGAATTCCAGTTCTGAACACTGGGAGTGCACCTGCTTGTCGGA |
| | TGTGGTGATGGGCCACATGGTGGGGAGTGAGGGAGACTCAGGGCCTGTGGGGCAGTCGATGTGGG |
| | AGGACTGTCACAGAGACTCTCAGAGGGTGCATTCAGCCCTGAACAGGGCAAAGGACTGCAAGGGG |
| | CAGGAGCTTGGGCTGACATGCAAGGTGGCTTTACACAAGGCCCTTTTTAGAGAGTGTGATTCTCT |
| | GAAGCTTTTCTTGGCAGCTTCAGTCTTGAACCTCACTGGAAGGGATCCTCCAAAACATGACCCAG |
| | ATGGAAAGAAGTATTTCTGAGTTTAAAATAACTCCCCTATTTGGTAATACGGGACTTTATTTGTG |
| | ACTTTATTATTTTTAGGTGTGATAATGGTTTTGCAGTTGTATTTAAAAGAAAAAAAACGAGTTCC |
| | TATGTTTAAAAAATACATACAGAGGTGTTTACTGATGAAATGATATGACGTCTGGGATCAACTTA |
| | AATAATAAAATGGGCTAGGGAGGCGATAGGGTTACAGAAGACAAGAATGACTGTGAGCTGTGGTG |
| | GTTGGAGCTGGAAGATGTGGACTTGGGGACTGATTTATAACATTCTCTCTACTTTTGTAGTATTT |
| | GAGATTTTTCCAGAAAATAAAGGTATTGCCTGACTGGTGGAGAGCAGTATGGCCTTGTTTAGTCG |
| | GTGTTGTTTCTTCACCAAGGGTTTGGCTCAGAGGTAGCAAGGGGACAAGTGTCCTATGGGCAAGA |
| | AAGTACCTGTGAGCTCAAGTCTTGTATCTGGGAAGTTCATTGTGAAGGGGTCATTTAAGGGTCTG |
| | TACTGTGCACTGTCCCCCATTCTCCTGGAAGAACAGAGATCCCTTGTCTTTTTCAGTGCATGAGG |
| | CAGAGTCAGATGTGGCGTTTGCTTGAGTTTCAGCACAGGTGCCTCTGTGCCTCGTGGTGAGGGTC |
| | AGGAAGAAGCAGCTGGGACGTGCTCACGTGGCTGGTAGTGTTATGAAGACAAGGCTTTGGGACCT |
| | TTCTTTGGCCATTTGAGCCCTGGCTATTAGAGAAAGATGATTTGCCTGAGAGGAGATTGACCACA |
| | CTCTCAGAAAGAAGGGGACAAAGAACACGTCAAGGGTTAAGCAGCCTTCCCTTTAAGGGAGGACT |
| | GGGGCACAAGATGGAAGATGAAAGGGAGCAGAGTGGCAATTGCAGAGCTGGAAAGGGGAATTTTG |
| | TTCTTCTAGATAGCAAAAGCCAGGACTGTCGCTGTGTGACTTGAAAGCTAGGTCACTGGTGGGCT |
| | TCGTGCAGCCCGTCACAGGGGAGCCATGGTGGGCCTCGTCTCTGCCGTATCTGCTGCCTGGAAGC |
| | TGAGACTGGCCTAACCACATCACACCATTCCCAGACCCAGGCCCAGGCCCAGGCCCGGGTCCCTC |
| | TGGTTTTACAAAATGTCCGCTCTCTCTCGCTTCACACAGAGGCTATTATTAGCAAGTGTCACTCA |
| | GTTATCTGAGAGTGGCGCTTTTAGCTGCCATCTAAGTGCCTGATACTTGGGTTTACAGCAGATTA |
| | AATTAAATTTTAGGCTGGTTTGGCTTCACTGGCAGTAGACAATGGAAGGCAGCTGTTGTAGAAAT |
| | GTAACCTGGCACCCTCAAGGATTTGTGTGAGTGTGTGTGTGTGTGTGTGTGTGAGTGTGTGTGTG |
| | TGTGTGTGTGTGTGTGTGTGTGCTGACCACTAGGCTACACTTCCTTTTCCTTTCCTCTCCATTTC |
| | ATCCCTTTCCAAAAAGTGTTTAGACAAATAGTTTCCCAGACTTGGTTTTATCATGCTGGGTTGAC |
| | AAAGGTTGTGTACAGAGCTGGAATAATTTTTTCTTCTTTCTACTGTTGGCACATCAATATCTTTT |
| | TTTCTGC |
| BCL11A- | GTCTCTGTCCATCCAGACTCCTGACGTTCAAGTTCGCAGGGACGTCACGTCCGCACTTGAACTTG |
| Exon 1- | CAGCTCAGGGGGGCTTTTGCCATTTTTTTCATCTCTCTCTCTCTCTCTCCCTCTATCTCTCTTCT |
| SEQ ID NO: | CTCTCTCTCCCTCTTTTTTTTTTTTTTTTTTTTTTTTTTTTTGCTTAAAAAAAAGCCATGACGGC |
| 2636 | TCTCCCACAATTCATCTTCCCTGCGCCATCTTTGTATTATTTCTAATTTATTTTGGATGTCAAAA |
| | GGCACTGATGAAGATATTTTCTCTGGAGTCTCCTTCTTTCTAACCCGGCTCTCCCGATGTGAACC |
| | GAGCCGTCGTCCGCCCGCCGCCGCCGCCGCCGCCGCCGCCGCCCGCCCCGCAGCCCACCATGTCT |
| | CGCCGCAAGCAAGGCAAACCCCAGCACTTAAGCAAACGGGAATTCTCGCGTAAGTAACCCAATAA |
| | TAGTAATAATAATTATTAATAATCACGAGAGCGC |
| BCL11A- | CTGTCCTCTCTGGCACTCTAATAATTGTGCTTTTGTTTCTCCAACCACAGCCGAGCCTCTTGAAG |
| Exon 2- | CCATTCTTACAGATGATGAACCAGACCACGGCCCGTTGGGAGCTCCAGAAGGGGATCATGACCTC |
| SEQ ID NO: | CTCACCTGTGGGCAGTGCCAGATGAACTTCCCATTGGGGGACATTCTTATTTTTATCGAGCACAA |
| 2637 | ACGGAAACAATGCAATGGCAGCCTCTGCTTAGAAAAAGCTGTGGATAAGCCACCTTCCCCTTCAC |
| | CAATCGAGATGAAAAAAGCATCCAATCCCGTGGAGGTTGGCATCCAGGTCACGCCAGAGGATGAC |
| | GATTGTTTATCAACGTCATCTAGAGGAATTTGCCCCAAACAGGAACACATAGCAGGTAAATGAGA |
| | AGCAAGGAGAAAAGCTGTTTGCATGTTTTCTTTTCATTTT |
| BCL11A- | GATGCACGTTGTTTGTAGCTGTAGTGCTTGATTTTGGGTTTCTTTCACAGATAAACTTCTGCACT |
| Exon 3- | GGAGGGGCCTCTCCTCCCCTCGTTCTGCACATGGAGCTCTAATCCCCACGCCTGGGATGAGTGCA |
| SEQ ID NO: | GAATATGCCCCGCAGGGTATTTGTAAGTTGAGCCTTATTTCTTCTACAAATGTCCATGTGTATAG |
| 2638 | AGATGAG |
| BCL11A | TGCCCGCCTCAGTGATTAAACATTGATGTTGGTGTTGTATTATTTTGCAGGTAAAGATGAGCCCA |
| Exon 4- | GCAGCTACACATGTACAACTTGCAAACAGCCATTCACCAGTGCATGGTTTCTCTTGCAACACGCA |
| SEQ ID NO: | CAGAACACTCATGGATTAAGAATCTACTTAGAAAGCGAACACGGAAGTCCCCTGACCCCGCGGGT |
| 2639 | TGGTATCCCTTCAGGACTAGGTGCAGAATGTCCTTCCCAGCCACCTCTCCATGGGATTCATATTG |
| | CAGACAATAACCCCTTTAACCTGCTAAGAATACCAGGATCAGTATCGAGAGAGGCTTCCGGCCTG |
| | GCAGAAGGGCGCTTTCCACCCACTCCCCCCCTGTTTAGTCCACCACCGAGACATCACTTGGACCC |
| | CCACCGCATAGAGCGCCTGGGGGCGGAAGAGATGGCCCTGGCCACCCATCACCCGAGTGCCTTTG |
| | ACAGGGTGCTGCGGTTGAATCCAATGGCTATGGAGCCTCCCGCCATGGATTTCTCTAGGAGACTT |
| | AGAGAGCTGGCAGGGAACACGTCTAGCCCACCGCTGTCCCCAGGCCGGCCCAGCCCTATGCAAAG |
| | GTTACTGCAACCATTCCAGCCAGGTAGCAAGCCGCCCTTCCTGGCGACGCCCCCCCTCCCTCCTC |
| | TGCAATCCGCCCCTCCTCCCTCCCAGCCCCCGGTCAAGTCCAAGTCATGCGAGTTCTGCGGCAAG |
| | ACGTTCAAATTTCAGAGCAACCTGGTGGTGCACCGGCGCAGCCACACGGGCGAGAAGCCCTACAA |
| | GTGCAACCTGTGCGACCACGCGTGCACCCAGGCCAGCAAGCTGAAGCGCCACATGAAGACGCACA |
| | TGCACAAATCGTCCCCCATGACGGTCAAGTCCGACGACGGTCTCTCCACCGCCAGCTCCCCGGAA |
| | CCCGGCACCAGCGACTTGGTGGGCAGCGCCAGCAGCGCGCTCAAGTCCGTGGTGGCCAAGTTCAA |
| | GAGCGAGAACGACCCCAACCTGATCCCGGAGAACGGGGACGAGGAGGAAGAGGAGGACGACGAGG |
| | AAGAGGAAGAAGAGGAGGAAGAGGAGGAGGAGGAGCTGACGGAGAGCGAGAGGGTGGACTACGGC |
| | TTCGGGCTGAGCCTGGAGGCGGCGCGCCACCACGAGAACAGCTCGCGGGGCGCGGTCGTGGGCGT |
| | GGGCGACGAGAGCCGCGCCCTGCCCGACGTCATGCAGGGCATGGTGCTCAGCTCCATGCAGCACT |
| | TCAGCGAGGCCTTCCACCAGGTCCTGGGCGAGAAGCATAAGCGCGGCCACCTGGCCGAGGCCGAG |
| | GGCCACAGGGACACTTGCGACGAAGACTCGGTGGCCGGCGAGTCGGACCGCATAGACGATGGCAC |
| | TGTTAATGGCCGCGGCTGCTCCCCGGGCGAGTCGGCCTCGGGGGGCCTGTCCAAAAAGCTGCTGC |
| | TGGGCAGCCCCAGCTCGCTGAGCCCCTTCTCTAAGCGCATCAAGCTCGAGAAGGAGTTCGACCTG |
| | CCCCCGGCCGCGATGCCCAACACGGAGAACGTGTACTCGCAGTGGCTCGCCGGCTACGCGGCCTC |
| | CAGGCAGCTCAAAGATCCCTTCCTTAGCTTCGGAGACTCCAGACAATCGCCTTTTGCCTCCTCGT |
| | CGGAGCACTCCTCGGAGAACGGGAGTTTGCGCTTCTCCACACCGCCCGGGGAGCTGGACGGAGGG |
| | ATCTCGGGGCGCAGCGGCACGGGAAGTGGAGGGAGCACGCCCCATATTAGTGGTCCGGGCCCGGG |
| | CAGGCCCAGCTCAAAAGAGGGCAGACGCAGCGACACTTGTGAGTACTGTGGGAAAGTCTTCAAGA |
| | ACTGTAGCAATCTCACTGTCCACAGGAGAAGCCACACGGGCGAAAGGCCTTATAAATGCGAGCTG |
| | TGCAACTATGCCTGTGCCCAGAGTAGCAAGCTCACCAGGCACATGAAAACGCATGGCCAGGTGGG |
| | GAAGGACGTTTACAAATGTGAAATTTGTAAGATGCCTTTTAGCGTGTACAGTACCCTGGAGAAAC |
| | ACATGAAAAAATGGCACAGTGATCGAGTGTTGAATAATGATATAAAAACTGAATAGAGGTATATT |
| | AATACCCCTCCCTCACTCCCACCTGACACCCCCTTTTTCACCACTCCCCTTCCCCATCGCCCTCC |
| | AGCCCCACTCCCTGTAGGATTTTTTTCTAGTCCCATGTGATTTAAACAAACAAACAAACAAACAG |
| | AAGTAACGAAGCTAAGAATATGAGAGTGCTTGTCACCAGCACACCTGTTTTTTTTCTTTTTCTTT |
| | TTCTTTTTTCTTTTTCCTTTTTTTTTTTTTTCCTTTATGTTCTCACCGTTTGAATGCATGATCTG |
| | TATGGGGCAATACTATTGCATTTTACGCAAACTTTGAGCCTTTCTCTTGTGCAATAATTTACATG |
| | TTGTGTATGTTTTTTTTTAAACTTAGACAGCATGTATGGTATGTTATGGCTATTTTAAATTGTCC |
| | CTAATTCGTTGCTGAGCAAACATGTTGCTGTTTCCAGTTCCGTTCTGAGAGAAAAAGAGAGAGAG |
| | AGAGAAAAAGACCATGCTGCATACATTCTGTAATACATATCATGTACAGTTTTATTTTATAACGT |
| | GAGGAGGAAAAACAGTCTTTGGATTAACCCTCTATAGACAGAATAGATAGCACTGAAAAAAAATC |
| | TCTATGAGCTAAATGTCTGTCTCTAAAGGGTTAAATGTATCAATTGGAAAGGAAGAAAAAAGGCC |
| | TTGAATTGACAAATTAACAGAAAAACAGAACAAGTTTATTCTATCATTTGGTTTTAAAATATGAG |
| | TGCCTTGGATCTATTAAAACCACATCGATGGTTCTTTCTACTTGTTATAAACTTGTAGCTTAATT |
| | CAGCATTGGGTGAGGTAATAAACCTTAGGAACTAGCATATAATTCTATATTGTATTTCTCACAAC |
| | AATGGCTACCTAAAAAGATGACCCATTATGTCCTAGTTAATCATCATTTTTCCTTTAGTTTAATT |
| | TTATAAACAAAACTGATTATACCAGTATAAAAGCTACTTTGCTCCTGGTGAGAGCTTAAAAGAAA |
| | TGGGCTGTTTTGCCCAAAGTTTTATTTTTTTTAAACAATGATTAAATTGAATGTGTAATGTGCAA |
| | AAGCCCTGGAACGCAATTAAATACACTAGTAAGGAGTTCATTTTATGAAGATATTTGCTTTAATA |
| | ATGTCTTTTTAAAAATACTGGCACCAAAAGAAATAGATCCAGATCTACTTGGTTGTCAAGTGGAC |
| | AATCAAATGATAAACTTTAAGACCTTGTATACCATATTGAAAGGAAGAGGCTGACAATAAGGTTT |
| | GACAGAGGGGAACAGAAGAAAATAATATGATTTATTAGCACAACGTGGTACTATTTGCCATTTAA |
| | AACTAGAACAGGTATATAAGCTAATATTGATACAATGATGATTAACTATGAATTCTTAAGACTTG |
| | CATTTAAATGTGACATTCTTAAAAAAAGAAGAGAAAGAATTTTAAGAGTAGCAGTATATATGTCT |
| | GTGCTCCCTAAAAGTTGTACTTCATTTCTTTTCCATACACTGTGTGCTATTTGTGTTAACATGGA |
| | AGAGGATTCATTGTTTTTATTTTTATTTTTTTAATTTTTTCTTTTTTATTAAGCTAGCATCTGCC |
| | CCAGTTGGTGTTCAAATAGCACTTGACTCTGCCTGTGATATCTGTATCTTTTCTCTAATCAGAGA |
| | TACAGAGGTTGAGTATAAAATAAACCTGCTCAGATAGGACAATTAAGTGCACTGTACAATTTTCC |
| | CAGTTTACAGGTCTATACTTAAGGGAAAAGTTGCAAGAATGCTGAAAAAAAATTGAACACAATCT |
| | CATTGAGGAGCATTTTTTAAAAACTAAAAAAAAAAAAACTTTGCCAGCCATTTACTTGACTATTG |
| | AGCTTACTTACTTGGACGCAACATTGCAAGCGCTGTGAATGGAAACAGAATACACTTAACATAGA |
| | AATGAATGATTGCTTTCGCTTCTACAGTGCAAGGATTTTTTTGTACAAAACTTTTTTAAATATAA |
| | ATGTTAAGAAAAATTTTTTTTAAAAAACACTTCATTATGTTTAGGGGGGAACTGCATTTTAGGGT |
| | TCCATTGTCTTGGTGGTGTTACAAGACTTGTTATCCATTTAAAAATGGTAGTGGAAATTCTATGC |
| | CTTGGATACACACCGCTCTTCAGGTTGTAAAAAAAAAAAACATACATTGGGGAAAGGTTTAAGAT |
| | TATATAGTACTTAAATATAGGAAAATGCACACTCATGTTGATTCCTATGCTAAAATACATTTATG |
| | GTCTTTTTTCTGTATTTCTAGAATGGTATTTGAATTAAATGTTCATCTAGTGTTAGGCACTATAG |
| | TATTTATATTGAAGCTTGTATTTTTAACTGTTGCTTGTTCTCTTAAAAGGTATCAATGTACCTTT |
| | TTTGGTAGTGGAAAAAAAAAAGACAGGCTGCCACAGTATATTTTTTTAATTTGGCAGGATAATAT |
| | AGTGCAAATTATTTGTATGCTTCAAAAAAAAAAAAAAGAGAGAAACAAAAAAGTGTGACATTACA |
| | GATGAGAAGCCATATAATGGCGGTTTGGGGGAGCCTGCTAGAATGTCACATGGATGGCTGTCATA |
| | GGGGTTGTACATATCCTTTTTTGTTCCTTTTTCCTGCTGCCATACTGTATGCAGTACTGCAAGCT |
| | AATAACGTTGGTTTGTTATGTAGTGTGCTTTTTGTCCCTTTCCTTCTATCACCCTACATTCCAGC |
| | ATCTTACCTTCATATGCAGTAAAAGAAAGAAAGAAAAAAAAAGGAAAAAAAAAAAAAAACCAATG |
| | TTTTGCAGTTTTTTTCATTGCCAAAAACTAAATGGTGCTTTATATTTAGATTGGAAAGAATTTCA |
| | TATGCAAAGCATATTAAAGAGAAAGCCCGCTTTAGTCAATACTTTTTTGTAAATGGCAATGCAGA |
| | ATATTTTGTTATTGGCCTTTTCTATTCCTGTAATGAAAGCTGTTTGTCGTAACTTGAAATTTTAT |
| | CTTTTACTATGGGAGTCACTATTTATTATTGCTTATGTGCCCTGTTCAAAACAGAGGCACTTAAT |
| | TTGATCTTTTATTTTTCTTTGTTTTTATTTTTTTTTTTATTTAGATGACCAAAGGTCATTACAAC |
| | CTGGCTTTTTATTGTATTTGTTTCTGGTCTTTGTTAAGTTCTATTGGAAAAACCACTGTCTGTGT |
| | TTTTTTGGCAGTTGTCTGCATTAACCTGTTCATACACCCATTTTGTCCCTTTATTGAAAAAATAA |
| | AAAAAATTAAAGTACACATTGTAAGCTTCTTGTGTCCTCATTTGACACACTCTGTAAATTACTTG |
| | C |
| BCL11A- | CATCTACTCTTAGACATAACACACCAGGGTCAATACAACTTTGAAGCTAGTCTAGTGCAAGCTAA |
| Enhancer | CAGTTGCTTTTATCACAGGCTCCAGGAAGGGTTTGGCCTCTGATTAGGGTGGGGGCGTGGGTGGG |
| region- | GTAGAAGAGGACTGGCAGA |
| SEQ ID NO: | |
| 2640 | |
| SEQ ID NO: | MSSAIKSYKS VLRPNERKNQ LLKSTIQCLE DGSAFFFKML QGLEGGITPE IVRFSTEQEK |
| 2641 | QQQDIALWCA VNWFRPVSQD SLTHTIASDN LVEKFEEYYG GTASDAIKQY FSASIGESYY |
| (Variant | WNDCRQQYYD LCRELGVEVS DLTHDLEILC REKCLAVATE SNQNNSIISV LFGTGEKEDR |
| Cas12i2 of | SVKLRITKKI LEAISNLKEI PKNVAPIQEI ILNVAKATKE TFRQVYAGNL GAPSTLEKFI |
| SEQ ID NO: 3 | AKDGQKEFDL KKLQTDLKKV IRGKSKERDW CCQEELRSYV EQNTIQYDLW AWGEMENKAH |
| of | TALKIKSTRN YNFAKQRLEQ FKEIQSLNNL LVVKKLNDFF DSEFFSGEET YTICVHHLGG |
| PCT/US2021/ | KDLSKLYKAW EDDPADPENA IVVLCDDLKN NFKKEPIRNI LRYIFTIRQE CSAQDILAAA |
| 025257) | KYNQQLDRYK SQKANPSVLG NQGETWTNAV ILPEKAQRND RPNSLDLRIW LYLKLRHPDG |
| | RWKKHHIPFY DTRFFQEIYA AGNSPVDTCQ FRTPRFGYHL PKLTDQTAIR VNKKHVKAAK |
| | TEARIRLAIQ QGTLPVSNLK ITEISATINS KGQVRIPVKF RVGRQKGTLQ IGDRFCGYDQ |
| | NQTASHAYSL WEVVKEGQYH KELGCFVRFI SSGDIVSITE NRGNQFDQLS YEGLAYPQYA |
| | DWRKKASKFV SLWQITKKNK KKEIVTVEAK EKFDAICKYQ PRLYKENKEY AYLLRDIVRG |
| | KSLVELQQIR QEIFRFIEQD CGVTRLGSLS LSTLETVKAV KGIIYSYFST ALNASKNNPI |
| | SDEQRKEFDP ELFALLEKLE LIRTRKKKQK VERIANSLIQ TCLENNIKFI RGEGDLSTIN |
| | NATKKKANSR SMDWLARGVF NKIRQLAPMH NITLFGCGSL YTSHQDPLVH RNPDKAMKCR |
| | WAAIPVKDIG RWVLRKLSQN LRAKNRGTGE YYHQGVKEFL SHYELQDLEE ELLKWRSDRK |
| | SNIPCWVLQN RLAEKLGNKE AVVYIPVRGG RIYFATHKVA TGAVSIVEDQ KQVWVCNADH |
| | VAAANIALTG KGIGEQSSDE ENPDGSRIKL QLTS |
| SEQ ID NO: | MSSAIKSYKS VLRPNERKNQ LLKSTIQCLE DGSAFFFKML QGLEGGITPE IVRESTEQEK |
| 2642 | QQQDIALWCA VNWFRPVSQD SLTHTIASDN LVEKFEEYYG GTASDAIKQY FSASIGESYY |
| (Variant | WNDCRQQYYD LCRELGVEVS DLTHDLEILC REKCLAVATE SNQNNSIISV LFGTGEKEDR |
| Cas12i2 of | SVKLRITKKI LEAISNLKEI PKNVAPIQEI ILNVAKATKE TFRQVYAGNL GAPSTLEKFI |
| SEQ ID NO: 4 | AKDGQKEFDL KKLQTDLKKV IRGKSKERDW CCQEELRSYV EQNTIQYDLW AWGEMENKAH |
| of | TALKIKSTRN YNFAKQRLEQ FKEIQSLNNL LVVKKLNDFF DSEFFSGEET YTICVHHLGG |
| PCT/US2021/ | KDLSKLYKAW EDDPADPENA IVVLCDDLKN NFKKEPIRNI LRYIFTIRQE CSAQDILAAA |
| 025257) | KYNQQLDRYK SQKANPSVLG NQGFTWTNAV ILPEKAQRND RPNSLDLRIW LYLKLRHPDG |
| | RWKKHHIPFY DTRFFQEIYA AGNSPVDTCQ FRTPRFGYHL PKLTDQTAIR VNKKHVKAAK |
| | TEARIRLAIQ QGTLPVSNLK ITEISATINS KGQVRIPVKF RVGRQKGTLQ IGDRFCGYDQ |
| | NQTASHAYSL WEVVKEGQYH KELGCFVRFI SSGDIVSITE NRGNQFDQLS YEGLAYPQYA |
| | DWRKKASKFV SLWQITKKNK KKEIVTVEAK EKFDAICKYQ PRLYKENKEY AYLLRDIVRG |
| | KSLVELQQIR QEIFRFIEQD CGVTRLGSLS LSTLETVKAV KGIIYSYFST ALNASKNNPI |
| | SDEQRKEFDP ELFALLEKLE LIRTRKKKQK VERIANSLIQ TCLENNIKFI RGEGDLSTTN |
| | NATKKKANSR SMDWLARGVF NKIRQLAPMH NITLFGCGSL YTSHQDPLVH RNPDKAMKCR |
| | WAAIPVKDIG DWVLRKLSQN LRAKNRGTGE YYHQGVKEFL SHYELQDLEE ELLKWRSDRK |
| | SNIPCWVLQN RLAEKLGNKE AVVYIPVRGG RIYFATHKVA TGAVSIVEDQ KQVWVCNADH |
| | VAAANIALTG KGIGEQSSDE ENPDGSRIKL QLTS |
| SEQ ID NO: | MSSAIKSYKS VLRPNERKNQ LLKSTIQCLE DGSAFFFKML QGLEGGITPE IVRESTEQEK |
| 2643 | QQQDIALWCA VNWFRPVSQD SLTHTIASDN LVEKFEEYYG GTASDAIKQY FSASIGESYY |
| (Variant | WNDCRQQYYD LCRELGVEVS DLTHDLEILC REKCLAVATE SNQNNSIISV LFGTGEKEDR |
| Cas12i2 of | SVKLRITKKI LEAISNLKEI PKNVAPIQEI ILNVAKATKE TFRQVYAGNL GAPSTLEKFI |
| SEQ ID NO: 5 | AKDGQKEFDL KKLQTDLKKV IRGKSKERDW CCQEELRSYV EQNTIQYDLW AWGEMENKAH |
| of | TALKIKSTRN YNFAKQRLEQ FKEIQSLNNL LVVKKLNDFF DSEFFSGEET YTICVHHLGG |
| PCT/US2021/ | KDLSKLYKAW EDDPADPENA IVVLCDDLKN NFKKEPIRNI LRYIFTIRQE CSAQDILAAA |
| 025257) | KYNQQLDRYK SQKANPSVLG NQGFTWTNAV ILPEKAQRND RPNSLDLRIW LYLKLRHPDG |
| | RWKKHHIPFY DTRFFQEIYA AGNSPVDTCQ FRTPRFGYHL PKLTDQTAIR VNKKHVKAAK |
| | TEARIRLAIQ QGTLPVSNLK ITEISATINS KGQVRIPVKF RVGRQKGTLQ IGDRFCGYDQ |
| | NQTASHAYSL WEVVKEGQYH KELGCFVRFI SSGDIVSITE NRGNQFDQLS YEGLAYPQYA |
| | DWRKKASKFV SLWQITKKNK KKEIVTVEAK EKFDAICKYQ PRLYKENKEY AYLLRDIVRG |
| | KSLVELQQIR QEIFRFIEQD CGVTRLGSLS LSTLETVKAV KGIIYSYFST ALNASKNNPI |
| | SDEQRKEFDP ELFALLEKLE LIRTRKKKQK VERIANSLIQ TCLENNIKFI RGEGDLSTIN |
| | NATKKKANSR SMDWLARGVF NKIRQLAPMH NITLFGCGSL YTSHQDPLVH RNPDKAMKCR |
| | WAAIPVKDIG DWVLRKLSQN LRAKNRGTGE YYHQGVKEFL SHYELQDLEE ELLKWRSDRK |
| | SNIPCWVLQN RLAEKLGNKE AVVYIPVRGG RIYFATHKVA TGAVSIVEDQ KQVWVCNADH |
| | VAAANIALTG KGIGEQSSDE ENPDGGRIKL QLTS |
| SEQ ID NO: | MSSAIKSYKS VLRPNERKNQ LLKSTIQCLE DGSAFFFKML QGLFGGITPE IVRESTEQEK |
| 2644 | QQQDIALWCA VNWFRPVSQD SLTHTIASDN LVEKFEEYYG GTASDAIKQY FSASIGESYY |
| (Variant | WNDCRQQYYD LCRELGVEVS DLTHDLEILC REKCLAVATE SNQNNSIISV LFGTGEKEDR |
| Cas12i2 of | SVKLRITKKI LEAISNLKEI PKNVAPIQEI ILNVAKATKE TFRQVYAGNL GAPSTLEKFI |
| SEQ ID NO: | AKDGQKEFDL KKLQTDLKKV IRGKSKERDW CCQEELRSYV EQNTIQYDLW AWGEMENKAH |
| 495 of | TALKIKSTRN YNFAKQRLEQ FKEIQSLNNL LVVKKLNDFF DSEFFSGEET YTICVHHLGG |
| PCT/US2021/ | KDLSKLYKAW EDDPADPENA IVVLCDDLKN NFKKEPIRNI LRYIFTIRQE CSAQDILAAA |
| 025257) | KYNQQLDRYK SQKANPSVLG NQGFTWTNAV ILPEKAQRND RPNSLDLRIW LYLKLRHPDG |
| | RWKKHHIPFY DTRFFQEIYA AGNSPVDTCQ FRTPRFGYHL PKLTDQTAIR VNKKHVKAAK |
| | TEARIRLAIQ QGTLPVSNLK ITEISATINS KGQVRIPVKF RVGRQKGTLQ IGDRFCGYDQ |
| | NQTASHAYSL WEVVKEGQYH KELRCRVRFI SSGDIVSITE NRGNQFDQLS YEGLAYPQYA |
| | DWRKKASKFV SLWQITKKNK KKEIVTVEAK EKFDAICKYQ PRLYKENKEY AYLLRDIVRG |
| | KSLVELQQIR QEIFRFIEQD CGVTRLGSLS LSTLETVKAV KGIIYSYFST ALNASKNNPI |
| | SDEQRKEFDP ELFALLEKLE LIRTRKKKQK VERIANSLIQ TCLENNIKFI RGEGDLSTIN |
| | NATKKKANSR SMDWLARGVF NKIRQLAPMH NITLFGCGSL YTSHQDPLVH RNPDKAMKCR |
| | WAAIPVKDIG DWVLRKLSQN LRAKNRGIGE YYHQGVKEFL SHYELQDLEE ELLKWRSDRK |
| | SNIPCWVLQN RLAEKLGNKE AVVYIPVRGG RIYFATHKVA TGAVSIVEDQ KQVWVCNADH |
| | VAAANIALTG KGIGRQSSDE ENPDGGRIKL QLTS |
| SEQ ID NO: | MSSAIKSYKS VLRPNERKNQ LLKSTIQCLE DGSAFFFKML QGLFGGITPE IVRESTEQEK |
| 2645 | QQQDIALWCA VNWFRPVSQD SLTHTIASDN LVEKFEEYYG GTASDAIKQY FSASIGESYY |
| (Variant | WNDCRQQYYD LCRELGVEVS DLTHDLEILC REKCLAVATE SNQNNSIISV LFGTGEKEDR |
| Cas12i2 of | SVKLRITKKI LEAISNLKEI PKNVAPIQEI ILNVAKATKE TFRQVYAGNL GAPSTLEKFI |
| SEQ ID NO: | AKDGQKEFDL KKLQTDLKKV IRGKSKERDW CCQEELRSYV EQNTIQYDLW AWGEMENKAH |
| 496 of | TALKIKSTRN YNFAKQRLEQ FKEIQSLNNL LVVKKLNDFF DSEFFSGEET YTICVHHLGG |
| PCT/US2021/ | KDLSKLYKAW EDDPADPENA IVVLCDDLKN NFKKEPIRNI LRYIFTIRQE CSAQDILAAA |
| 025257) | KYNQQLDRYK SQKANPSVLG NQGFTWTNAV ILPEKAQRND RPNSLDLRIW LYLKLRHPDG |
| | RWKKHHIPFY DTRFFQEIYA AGNSPVDTCQ FRTPRFGYHL PKLTDQTAIR VNKKHVKAAK |
| | TEARIRLAIQ QGTLPVSNLK ITEISATINS KGQVRIPVKF RVGRQKGTLQ IGDRFCGYDQ |
| | NQTASHAYSL WEVVKEGQYH KELRCRVRFI SSGDIVSITE NRGNQFDQLS YEGLAYPQYA |
| | DWRKKASKFV SLWQITKKNK KKEIVTVEAK EKFDAICKYQ PRLYKENKEY AYLLRDIVRG |
| | KSLVELQQIR QEIFRFIEQD CGVTRLGSLS LSTLETVKAV KGIIYSYFST ALNASKNNPI |
| | SDEQRKEFDP ELFALLEKLE LIRTRKKKQK VERIANSLIQ TCLENNIKFI RGEGDLSTIN |
| | NATKKKANSR SMDWLARGVF NKIRQLATMH NITLFGCGSL YTSHQDPLVH RNPDKAMKCR |
| | WAAIPVKDIG DWVLRKLSQN LRAKNRGTGE YYHQGVKEFL SHYELQDLEE ELLKWRSDRK |
| | SNIPCWVLQN RLAEKLGNKE AVVYIPVRGG RIYFATHKVA TGAVSIVEDQ KQVWVCNADH |
| | VAAANIALTG KGIGRQSSDE ENPDGGRIKL QLTS |
| SEQ ID NO: | ATGGCTTCCATCTCTAGGCCATACGGCACCAAGCTGCGACCGGACGCACGGAAGAAGGAGATGCT |
| 2646 | CGATAAGTTCTTTAATACACTGACTAAGGGTCAGCGCGTGTTCGCAGACCTGGCCCTGTGCATCT |
| (Nucleotide | ATGGCTCCCTGACCCTGGAGATGGCCAAGTCTCTGGAGCCAGAAAGTGATTCAGAACTGGTGTGC |
| sequence | ACAGCCCCAGCTCCGACAAGTACGTGTGGATCGATTGCAGGCAGAAATTCCTGAGGTTTCAGCGC |
| encoding | GCTATTGGGTGGTTTCGGCTGGTGGACAAGACCATCTGGTCCAAGGATGGCATCAAGCAGGAGAA |
| Cas12i4) | TCTGGTGAAACAGTACGAAGCCTATTCCGGAAAGGAGGCTTCTGAAGTGGTCAAAACATACCTGA |
| | GAGCTCGGCACTCGCAACCTGTCCGAGGACTTCGAATGTATGCTCTTTGAACAGTACATTAGACT |
| | GACCAAGGGCGAGATCGAAGGGTATGCCGCTATTTCAAATATGTTCGGAAACGGCGAGAAGGAAG |
| | ACCGGAGCAAGAAAAGAATGTACGCTACACGGATGAAAGATTGGCTGGAGGCAAACGAAAATATC |
| | ACTTGGGAGCAGTATAGAGAGGCCCTGAAGAACCAGCTGAATGCTAAAAACCTGGAGCAGGTTGT |
| | GGCCAATTACAAGGGGAACGCTGGCGGGGCAGACCCCTTCTTTAAGTATAGCTTCTCCAAAGAGG |
| | GAATGGTGAGCAAGAAAGAACATGCACAGCAGCTCGACAAGTTCAAAACCGTCCTGAAGAACAAA |
| | GCCCGGGACCTGAATTTTCCAAACAAGGAGAAGCTGAAGCAGTACCTGGAGGCCGAAATCGGCAT |
| | TCCGGTCGACGCTAACGTGTACTCCCAGATGTTCTCTAACGGGGTGAGTGAGGTCCAGCCTAAGA |
| | CCACACGGAATATGTCTTTTAGTAACGAGAAACTGGATCTGCTCACTGAACTGAAGGACCTGAAC |
| | AAGGGCGATGGGTTCGAGTACGCCAGAGAAGTGCTGAACGGGTTCTTTGACTCCGAGCTCCACAC |
| | TACCGAGGATAAGTTTAATATCACCTCTAGGTACCTGGGAGGCGACAAATCAAACCGCCTGAGCA |
| | AACTCTATAAGATCTGGAAGAAAGAGGGTGTGGACTGCGAGGAAGGCATTCAGCAGTTCTGTGAA |
| | GCCGTCAAAGATAAGATGGGCCAGATCCCCATTCGAAATGTGCTGAAGTACCTGTGGCAGTTCCG |
| | GGAGACAGTCAGTGCCGAGGATTTTGAAGCAGCCGCTAAGGCTAACCATCTGGAGGAAAAGATCA |
| | GCCGGGTGAAAGCCCACCCAATCGTGATTAGCAATAGGTACTGGGCTTTTGGGACTTCCGCACTG |
| | GTGGGAAACATTATGCCCGCAGACAAGAGGCATCAGGGAGAGTATGCCGGTCAGAATTTCAAAAT |
| | GTGGCTGGAGGCTGAACTGCACTACGATGGCAAGAAAGCAAAGCACCATCTGCCTTTTTATAACG |
| | CCCGCTTCTTTGAGGAAGTGTACTGCTATCACCCCTCTGTCGCCGAGATCACTCCTTTCAAAACC |
| | AAGCAGTTTGGCTGTGAAATCGGGAAGGACATTCCAGATTACGTGAGCGTCGCTCTGAAGGACAA |
| | TCCGTATAAGAAAGCAACCAAACGAATCCTGCGTGCAATCTACAATCCCGTCGCCAACACAACTG |
| | GCGTTGATAAGACCACAAACTGCAGCTTCATGATCAAACGCGAGAATGACGAATATAAGCTGGTC |
| | ATCAACCGAAAAATTTCCGTGGATCGGCCTAAGAGAATCGAAGTGGGCAGGACAATTATGGGGTA |
| | CGACCGCAATCAGACAGCTAGCGATACTTATTGGATTGGCCGGCTGGTGCCACCTGGAACCCGGG |
| | GCGCATACCGCATCGGAGAGTGGAGCGTCCAGTATATTAAGTCCGGGCCTGTCCTGTCTAGTACT |
| | CAGGGAGTTAACAATTCCACTACCGACCAGCTGGTGTACAACGGCATGCCATCAAGCTCCGAGCG |
| | GTTCAAGGCCTGGAAGAAAGCCAGAATGGCTTTTATCCGAAAACTCATTCGTCAGCTGAATGACG |
| | AGGGACTGGAATCTAAGGGTCAGGATTATATCCCCGAGAACCCTTCTAGTTTCGATGTGCGGGGC |
| | GAAACCCTGTACGTCTTTAACAGTAATTATCTGAAGGCCCTGGTGAGCAAACACAGAAAGGCCAA |
| | GAAACCTGTTGAGGGGATCCTGGACGAGATTGAAGCCTGGACATCTAAAGACAAGGATTCATGCA |
| | GCCTGATGCGGCTGAGCAGCCTGAGCGATGCTTCCATGCAGGGAATCGCCAGCCTGAAGAGTCTG |
| | ATTAACAGCTACTTCAACAAGAATGGCTGTAAAACCATCGAGGACAAAGAAAAGTTTAATCCCGT |
| | GCTGTATGCCAAGCTGGTTGAGGTGGAACAGCGGAGAACAAACAAGCGGTCTGAGAAAGTGGGAA |
| | GAATCGCAGGTAGTCTGGAGCAGCTGGCCCTGCTGAACGGGGTTGAGGTGGTCATCGGCGAAGCT |
| | GACCTGGGGGAGGTCGAAAAAGGAAAGAGTAAGAAACAGAATTCACGGAACATGGATTGGTGCGC |
| | AAAGCAGGTGGCACAGCGGCTGGAGTACAAACTGGCCTTCCATGGAATCGGTTACTTTGGAGTGA |
| | ACCCCATGTATACCAGCCACCAGGACCCTTTCGAACATAGGCGCGTGGCTGATCACATCGTCATG |
| | CGAGCACGTTTTGAGGAAGTCAACGTGGAGAACATTGCCGAATGGCACGTGCGAAATTTCTCAAA |
| | CTACCTGCGTGCAGACAGCGGCACTGGGCTGTACTATAAGCAGGCCACCATGGACTTCCTGAAAC |
| | ATTACGGTCTGGAGGAACACGCTGAGGGCCTGGAAAATAAGAAAATCAAGTTCTATGACTTTAGA |
| | AAGATCCTGGAGGATAAAAACCTGACAAGCGTGATCATTCCAAAGAGGGGGGGGCGCATCTACAT |
| | GGCCACCAACCCAGTGACATCCGACTCTACCCCGATTACATACGCCGGCAAGACTTATAATAGGT |
| | GTAACGCTGATGAGGTGGCAGCCGCTAATATCGTTATTTCTGTGCTGGCTCCCCGCAGTAAGAAA |
| | AACGAGGAACAGGACGATATCCCTCTGATTACCAAGAAAGCCGAGAGTAAGTCACCACCGAAAGA |
| | CCGGAAGAGATCAAAAACAAGCCAGCTGCCTCAGAAA |
| SEQ ID NO: | MASISRPYGTKLRPDARKKEMLDKFFNTLTKGQRVFADLALCIYGSLTLEMAKSLEPESDSELVC |
| 2647 | AIGWFRLVDKTIWSKDGIKQENLVKQYEAYSGKEASEVVKTYLNSPSSDKYVWIDCRQKFLRFQR |
| Cas12i4 amino | ELGTRNLSEDFECMLFEQYIRLTKGEIEGYAAISNMFGNGEKEDRSKKRMYATRMKDWLEANENI |
| acid sequence | TWEQYREALKNQLNAKNLEQVVANYKGNAGGADPFFKYSFSKEGMVSKKEHAQQLDKFKTVLKNK |
| of SEQ ID | ARDLNFPNKEKLKQYLEAEIGIPVDANVYSQMFSNGVSEVQPKTTRNMSFSNEKLDLLTELKDLN |
| NO: 14 of | KGDGFEYAREVLNGFFDSELHTTEDKFNITSRYLGGDKSNRLSKLYKIWKKEGVDCEEGIQQFCE |
| U.S. Pat. No. | AVKDKMGQIPIRNVLKYLWQFRETVSAEDFEAAAKANHLEEKISRVKAHPIVISNRYWAFGTSAL |
| 10,808,245) | VGNIMPADKRHQGEYAGQNFKMWLEAELHYDGKKAKHHLPFYNARFFEEVYCYHPSVAEITPFKT |
| | KQFGCEIGKDIPDYVSVALKDNPYKKATKRILRAIYNPVANTTGVDKTTNCSFMIKRENDEYKLV |
| | INRKISVDRPKRIEVGRTIMGYDRNQTASDTYWIGRLVPPGTRGAYRIGEWSVQYIKSGPVLSST |
| | QGVNNSTTDQLVYNGMPSSSERFKAWKKARMAFIRKLIRQLNDEGLESKGQDYIPENPSSFDVRG |
| | ETLYVENSNYLKALVSKHRKAKKPVEGILDEIEAWTSKDKDSCSLMRLSSLSDASMQGIASLKSL |
| | INSYFNKNGCKTIEDKEKFNPVLYAKLVEVEQRRTNKRSEKVGRIAGSLEQLALLNGVEVVIGEA |
| | DLGEVEKGKSKKQNSRNMDWCAKQVAQRLEYKLAFHGIGYFGVNPMYTSHQDPFEHRRVADHIVM |
| | RARFEEVNVENIAEWHVRNFSNYLRADSGTGLYYKQATMDFLKHYGLEEHAEGLENKKIKFYDER |
| | KILEDKNLTSVIIPKRGGRIYMATNPVTSDSTPITYAGKTYNRCNADEVAAANIVISVLAPRSKK |
| | NEEQDDIPLITKKAESKSPPKDRKRSKTSQLPQK |
| SEQ ID NO: | MASISRPYGT KLRPDARKKE MLDKFFNTLT KGQRVFADLA LCIYGSLTLE MAKSLEPESD |
| 2648 | SELVCAIGWF RLVDKTIWSK DGIKQENLVK QYEAYSGKEA SEVVKTYLNS PSSDKYVWID |
| (Variant | CRQKFLRFQR ELGTRNLSED FECMLFEQYI RLTKGEIEGY AAISNMFGNG EKEDRSKKRM |
| Cas12i4) | YATRMKDWLE ANENITWEQY REALKNQLNA KNLEQVVANY KGNAGGADPF FKYSFSKEGM |
| | VSKKEHAQQL DKFKTVLKNK ARDLNFPNKE KLKQYLEAEI GIPVDANVYS QMFSNGVSEV |
| | QPKTTRNMSF SNEKLDLLTE LKDLNKGDGF EYAREVLNGF FDSELHTTED KFNITSRYLG |
| | GDKSNRLSKL YKIWKKEGVD CEEGIQQFCE AVKDKMGQIP IRNVLKYLWQ FRETVSAEDF |
| | EAAAKANHLE EKISRVKAHP IVISNRYWAF GTSALVGNIM PADKRHQGEY AGQNFKMWLE |
| | AELHYDGKKA KHHLPFYNAR FFEEVYCYHP SVAEITPFKT KQFGCEIGKD IPDYVSVALK |
| | DNPYKKATKR ILRAIYNPVA NTTGVDKTTN CSFMIKREND EYKLVINRKI SRDRPKRIEV |
| | GRTIMGYDRN QTASDTYWIG RLVPPGTRGA YRIGEWSVQY IKSGPVLSST QGVNNSTTDQ |
| | LVYNGMPSSS ERFKAWKKAR MAFIRKLIRQ LNDEGLESKG QDYIPENPSS FDVRGETLYV |
| | FNSNYLKALV SKHRKAKKPV EGILDEIEAW TSKDKDSCSL MRLSSLSDAS MQGIASLKSL |
| | INSYFNKNGC KTIEDKEKEN PVLYAKLVEV EQRRINKRSE KVGRIAGSLE QLALLNGVEV |
| | VIGEADLGEV EKGKSKKQNS RNMDWCAKQV AQRLEYKLAF HGIGYFGVNP MYTSHQDPFE |
| | HRRVADHIVM RARFEEVNVE NIAEWHVRNF SNYLRADSGT GLYYKQATMD FLKHYGLEEH |
| | AEGLENKKIK FYDFRKILED KNLTSVIIPK RGGRIYMATN PVTSDSTPIT YAGKTYNRCN |
| | ADEVAAANIV ISVLAPRSKK NREQDDIPLI TKKAESKSPP KDRKRSKTSQ LPQK |
| SEQ ID NO: | MASISRPYGT KLRPDARKKE MLDKFENTLT KGQRVFADLA LVIYHDLYLR MAKSLEPESD |
| 2649 | SELVCAIGWF RLVDKTIWSK DGIKQENLVK QYEAYSGKEA SEVVKTYLNS PSSDKYVWID |
| (Variant | CRQKFLRFQR ELGTRNLSED FECMLFEQYI RLTKGEIEGY AAISNMFGNG EKEDRSKKRM |
| Cas12i4) | YATRMKDWLE ANENITWEQY REALKNQLNA KNLEQVVANY KGNAGGADPF FKYSFSKEGM |
| | VSKKEHAQQL DKFKTVLKNK ARDLNFPNKE KLKQYLEAEI GIPVDANVYS QMFSNGVSEV |
| | QPKTTRNMSF SNEKLDLLTE LKDLNKGDGF EYAREVLNGF FDSELHTTED KFNITSRYLG |
| | GDKSNRLSKL YKIWKKEGVD CEEGIQQFCE AVKDKMGQIP IRNVLKYLWQ FRETVSAEDF |
| | EAAAKANHLE EKISRVKAHP IVISNRYWAF GTSALVGNIM PADKRHQGEY AGQNFKMWLR |
| | AELHYDGKKA KHHLPFYNAR FFEEVYCYHP SVAEITPFKT KQFGCEIGKD IPDYVSVALK |
| | DNPYKKATKR ILRAIYNPVA NTTRVDKTIN CSFMIKREND EYKLVINRKI SRDPRKRIEV |
| | GRTIMGYDRN QTASDTYWIG RLVPPGTRGA YRIGEWSVQY IKSGPVLSST QGVNNSTTDQ |
| | LVYNGMPSSS ERFKAWKKAR MAFIRKLIRQ LNDEGLESKG QDYIPENPSS FDVRGETLYV |
| | FNSNYLKALV SKHRKAKKPV EGILDEIEAW TSKDKDSCSL MRLSSLSDAS MQGIASLKSL |
| | INSYFNKNGC KTIEDKEKEN PVLYAKLVEV EQRRINKRSE KVGRIAGSLE QLALLNGVEV |
| | VIGEADLGEV EKGKSKKQNS RNMDWCAKQV AQRLEYKLAF HGIGYFGVNP MYTSHQDPFE |
| | HRRVADHIVM RARFEEVNVE NIAEWHVRNF SNYLRADSGT GLYYKQATMD FLKHYGLEEH |
| | AEGLENKKIK FYDERKILED KNLTSVIIPK RGGRIYMATN PVTSDSTPIT YAGKTYNRCN |
| | ADEVAAANIV ISVLAPRSKK NREQDDIPLI TKKAESKSPP KDRKRSKTSQ LPQK |
| SEQ ID NO: | MSNKEKNASETRKAYTTKMIPRSHDRMKLLGNFMDYLMDGTPIFFELWNQFGGGIDRDI |
| 2650 | ISGTANKDKISDDLLLAVNWFKVMPINSKPQGVSPSNLANLFQQYSGSEPDIQAQEYFA |
| (Cas12i1 of | SNFDTEKHQWKDMRVEYERLLAELQLSRSDMHHDLKLMYKEKCIGLSLSTAHYITSVMF |
| SEQ ID NO: 3 | GTGAKNNRQTKHQFYSKVIQLLEESTQINSVEQLASIILKAGDCDSYRKLRIRCSRKGA |
| of U.S. Pat. | TPSILKIVQDYELGINHDDEVNVPSLIANLKEKLGRFEYECEWKCMEKIKAFLASKVGP |
| No. | YYLGSYSAMLENALSPIKGMTTKNCKFVLKQIDAKNDIKYENEPFGKIVEGFFDSPYFE |
| 10,808,245) | SDTNVKWVLHPHHIGESNIKTLWEDLNAIHSKYEEDIASLSEDKKEKRIKVYQGDVCQT |
| | INTYCEEVGKEAKTPLVQLLRYLYSRKDDIAVDKIIDGITFLSKKHKVEKQKINPVIQK |
| | YPSFNFGNNSKLLGKIISPKDKLKHNLKCNRNQVDNYIWIEIKVLNTKTMRWEKHHYAL |
| | SSTRFLEEVYYPATSENPPDALAARFRTKINGYEGKPALSAEQIEQIRSAPVGLRKVKK |
| | RQMRLEAARQQNLLPRYTWGKDFNINICKRGNNFEVTLATKVKKKKEKNYKVVLGYDAN |
| | IVRKNTYAAIEAHANGDGVIDYNDLPVKPIESGFVTVESQVRDKSYDQLSYNGVKLLYC |
| | KPHVESRRSFLEKYRNGTMKDNRGNNIQIDFMKDFEAIADDETSLYYFNMKYCKLLQSS |
| | IRNHSSQAKEYREEIFELLRDGKLSVLKLSSLSNLSFVMFKVAKSLIGTYFGHLLKKPK |
| | NSKSDVKAPPITDEDKQKADPEMFALRLALEEKRLNKVKSKKEVIANKIVAKALELRDK |
| | YGPVLIKGENISDTTKKGKKSSTNSFLMDWLARGVANKVKEMVMMHQGLEFVEVNPNFT |
| | SHQDPFVHKNPENTFRARYSRCTPSELTEKNRKEILSFLSDKPSKRPTNAYYNEGAMAF |
| | LATYGLKKNDVLGVSLEKFKQIMANILHQRSEDQLLFPSRGGMFYLATYKLDADATSVN |
| | WNGKQFWVCNADLVAAYNVGLVDIQKDFKKK |
| SEQ ID NO: | MSISNNNILPYNPKLLPDDRKHKMLVDTFNQLDLIRNNLHDMIIALYGALKYDNIKQFA |
| 2651 | SKEKPHISADALCSINWFRLVKTNERKPAIESNQIISKFIQYSGHTPDKYALSHITGNH |
| (Cas12i3 of | EPSHKWIDCREYAINYARIMHLSFSQFQDLATACLNCKILILNGTLTSSWAWGANSALF |
| SEQ ID NO: | GGSDKENFSVKAKILNSFIENLKDEMNTTKFQVVEKVCQQIGSSDAADLFDLYRSTVKD |
| 14 of U.S. | GNRGPATGRNPKVMNLFSQDGEISSEQREDFIESFQKVMQEKNSKQIIPHLDKLKYHLV |
| Pat. No. | KQSGLYDIYSWAAAIKNANSTIVASNSSNLNTILNKTEKQQTFEELRKDEKIVACSKIL |
| 10,808,245) | LSVNDTLPEDLHYNPSTSNLGKNLDVFFDLLNENSVHTIENKEEKNKIVKECVNQYMEE |
| | CKGLNKPPMPVLLTFISDYAHKHQAQDFLSAAKMNFIDLKIKSIKVVPTVHGSSPYTWI |
| | SNLSKKNKDGKMIRTPNSSLIGWIIPPEEIHDQKFAGQNPIIWAVLRVYCNNKWEMHHF |
| | PFSDSRFFTEVYAYKPNLPYLPGGENRSKRFGYRHSTNLSNESRQILLDKSKYAKANKS |
| | VLRCMENMTHNVVFDPKTSLNIRIKTDKNNSPVLDDKGRITFVMQINHRILEKYNNTKI |
| | EIGDRILAYDQNQSENHTYAILQRTEEGSHAHQFNGWYVRVLETGKVTSIVQGLSGPID |
| | QLNYDGMPVTSHKFNCWQADRSAFVSQFASLKISETETFDEAYQAINAQGAYTWNLFYL |
| | RILRKALRVCHMENINQFREEILAISKNRLSPMSLGSLSQNSLKMIRAFKSIINCYMSR |
| | MSFVDELQKKEGDLELHTIMRLTDNKLNDKRVEKINRASSELTNKAHSMGCKMIVGESD |
| | LPVADSKTSKKQNVDRMDWCARALSHKVEYACKLMGLAYRGIPAYMSSHQDPLVHLVES |
| | KRSVLRPRFVVADKSDVKQHHLDNLRRMLNSKTKVGTAVYYREAVELMCEELGIHKTDM |
| | AKGKVSLSDFVDKFIGEKAIFPQRGGRFYMSTKRLTTGAKLICYSGSDVWLSDADEIAA |
| | INIGMFVVCDQTGAFKKKKKEKLDDEECDILPFRPM |

The application's sequence listing, which the Patent Office published only in electronic form, follows.

SEQUENCE LISTING (2680 sequences)

SEQ ID NO: 1 - RNA, 36 nt, Artificial Sequence
  Synthetic Construct
guugcaaaacccaagaaauccgucuuucauugacgg

SEQ ID NO: 2 - RNA, 36 nt, Artificial Sequence
  Synthetic Construct
aauagcggcccuaagaaauccgucuuucauugacgg

SEQ ID NO: 3 - RNA, 36 nt, Artificial Sequence
  Synthetic Construct
auuggaacuggcgagaaauccgucuuucauugacgg

SEQ ID NO: 4 - RNA, 36 nt, Artificial Sequence
  Synthetic Construct
ccagcaacaccuaagaaauccgucuuucauugacgg

SEQ ID NO: 5 - RNA, 36 nt, Artificial Sequence
  Synthetic Construct
cggcgcucgaauaggaaauccgucuuucauugacgg

SEQ ID NO: 6 - RNA, 36 nt, Artificial Sequence
  Synthetic Construct
guggcaacaccuaagaaauccgucuuucauugacgg

SEQ ID NO: 7 - RNA, 36 nt, Artificial Sequence
  Synthetic Construct
guugcaacaccuaagaaauccgucuuucauugacgg

SEQ ID NO: 8 - RNA, 36 nt, Artificial Sequence
  Synthetic Construct
guugcaaugccuaagaaauccgucuuucauugacgg

SEQ ID NO: 9 - RNA, 34 nt, Artificial Sequence
  Synthetic Construct
gcaacaccuaagaaauccgucuuucauugacggg

SEQ ID NO: 10 - RNA, 23 nt, Artificial Sequence
  Synthetic Construct
agaaauccgucuuucauugacgg

SEQ ID NO: 11 - DNA, 30 bp, Artificial Sequence
  Synthetic Construct
gacataacacaccagggtcaatacaacttt

SEQ ID NO: 12 - DNA, 30 bp, Artificial Sequence
  Synthetic Construct
gaagctagtctagtgcaagctaacagttgc

SEQ ID NO: 13 - DNA, 30 bp, Artificial Sequence
  Synthetic Construct
aagctagtctagtgcaagctaacagttgct

SEQ ID NO: 14 - DNA, 30 bp, Artificial Sequence
  Synthetic Construct
cttttatcacaggctccaggaagggtttgg

SEQ ID NO: 15 - DNA, 30 bp, Artificial Sequence
  Synthetic Construct
tatcacaggctccaggaagggtttggcctc

SEQ ID NO: 16 - DNA, 30 bp, Artificial Sequence
  Synthetic Construct
tcacaggctccaggaagggtttggcctctg

SEQ ID NO: 17 - DNA, 30 bp, Artificial Sequence
  Synthetic Construct
ggcctctgattagggtgggggcgtgggtgg

SEQ ID NO: 18 - DNA, 30 bp, Artificial Sequence
  Synthetic Construct
gcctctgattagggtgggggcgtgggtggg

SEQ ID NO: 19 - DNA, 30 bp, Artificial Sequence
  Synthetic Construct
atcacaggctccaggaagggtttggcctct

SEQ ID NO: 20 - DNA, 30 bp, Artificial Sequence
  Synthetic Construct
taccccacccacgcccccaccctaatcaga

SEQ ID NO: 21 - DNA, 30 bp, Artificial Sequence
  Synthetic Construct
ctggagcctgtgataaaagcaactgttagc

SEQ ID NO: 22 - DNA, 30 bp, Artificial Sequence
  Synthetic Construct
gcttgcactagactagcttcaaagttgtat

SEQ ID NO: 23 - DNA, 30 bp, Artificial Sequence
  Synthetic Construct
cactagactagcttcaaagttgtattgacc

SEQ ID NO: 24 - DNA, 30 bp, Artificial Sequence
  Synthetic Construct
aaagttgtattgaccctggtgtgttatgtc

SEQ ID NO: 25 - DNA, 30 bp, Artificial Sequence
  Synthetic Construct
tattgaccctggtgtgttatgtctaagagt

SEQ ID NO: 26 - DNA, 30 bp, Artificial Sequence
  Synthetic Construct
accctggtgtgttatgtctaagagtagatg

SEQ ID NO: 27 - DNA, 30 bp, Artificial Sequence
  Synthetic Construct
gggtgggggcgtgggtggggtagaagagga

SEQ ID NO: 28 - DNA, 30 bp, Artificial Sequence
  Synthetic Construct
tttgcttaaaaaaaagccatgacggctctc

SEQ ID NO: 29 - DNA, 30 bp, Artificial Sequence
  Synthetic Construct
tttttttttgcttaaaaaaaagccatgacg

SEQ ID NO: 30 - DNA, 30 bp, Artificial Sequence
  Synthetic Construct
ttttttttgcttaaaaaaaagccatgacgg

SEQ ID NO: 31 - DNA, 30 bp, Artificial Sequence
  Synthetic Construct
tttttttgcttaaaaaaaagccatgacggc

SEQ ID NO: 32 - DNA, 30 bp, Artificial Sequence
  Synthetic Construct
ttttttgcttaaaaaaaagccatgacggct

SEQ ID NO: 33 - DNA, 30 bp, Artificial Sequence
  Synthetic Construct
tttttgcttaaaaaaaagccatgacggctc

SEQ ID NO: 34 - DNA, 30 bp, Artificial Sequence
  Synthetic Construct
ttttgcttaaaaaaaagccatgacggctct

SEQ ID NO: 35 - DNA, 30 bp, Artificial Sequence
  Synthetic Construct
ttgcttaaaaaaaagccatgacggctctcc

SEQ ID NO: 36 - DNA, 30 bp, Artificial Sequence
  Synthetic Construct
tgacatccaaaataaattagaaataataca

SEQ ID NO: 37 - DNA, 30 bp, Artificial Sequence
  Synthetic Construct
gcttaaaaaaaagccatgacggctctccca

SEQ ID NO: 38 - DNA, 30 bp, Artificial Sequence
  Synthetic Construct
cttaaaaaaaagccatgacggctctcccac

SEQ ID NO: 39 - DNA, 30 bp, Artificial Sequence
  Synthetic Construct
aaaaaaagccatgacggctctcccacaatt

SEQ ID NO: 40 - DNA, 30 bp, Artificial Sequence
  Synthetic Construct
atcttccctgcgccatctttgtattatttc

SEQ ID NO: 41 - DNA, 30 bp, Artificial Sequence
  Synthetic Construct
cctgcgccatctttgtattatttctaattt

SEQ ID NO: 42 - DNA, 30 bp, Artificial Sequence
  Synthetic Construct
gtattatttctaatttattttggatgtcaa

SEQ ID NO: 43 - DNA, 30 bp, Artificial Sequence
  Synthetic Construct
ttttttttttgcttaaaaaaaagccatgac

SEQ ID NO: 44 - DNA, 30 bp, Artificial Sequence
  Synthetic Construct
tgcttaaaaaaaagccatgacggctctccc

SEQ ID NO: 45 - DNA, 30 bp, Artificial Sequence
  Synthetic Construct
tttttttttttgcttaaaaaaaagccatga

SEQ ID NO: 46 - DNA, 30 bp, Artificial Sequence
  Synthetic Construct
ttttttttttttttttttttttgcttaaaa

SEQ ID NO: 47 - DNA, 30 bp, Artificial Sequence
  Synthetic Construct
tttttttttttttgcttaaaaaaaagccat

SEQ ID NO: 48 - DNA, 30 bp, Artificial Sequence
  Synthetic Construct
ccatttttttcatctctctctctctctctc

SEQ ID NO: 49 - DNA, 30 bp, Artificial Sequence
  Synthetic Construct
ttttcatctctctctctctctctccctcta

SEQ ID NO: 50 - DNA, 30 bp, Artificial Sequence
  Synthetic Construct
tttcatctctctctctctctctccctctat

SEQ ID NO: 51 - DNA, 30 bp, Artificial Sequence
  Synthetic Construct
ttcatctctctctctctctctccctctatc

SEQ ID NO: 52 - DNA, 30 bp, Artificial Sequence
  Synthetic Construct
tcatctctctctctctctctccctctatct

SEQ ID NO: 53 - DNA, 30 bp, Artificial Sequence
  Synthetic Construct
catctctctctctctctctccctctatctc

SEQ ID NO: 54 - DNA, 30 bp, Artificial Sequence
  Synthetic Construct
atctctctctctctctctccctctatctct

SEQ ID NO: 55 - DNA, 30 bp, Artificial Sequence
  Synthetic Construct
tctctctctccctctttttttttttttttt

SEQ ID NO: 56 - DNA, 30 bp, Artificial Sequence
  Synthetic Construct
tattatttctaatttattttggatgtcaaa

SEQ ID NO: 57 - DNA, 30 bp, Artificial Sequence
  Synthetic Construct
tttttttttttttttttttgcttaaaaaaa

SEQ ID NO: 58 - DNA, 30 bp, Artificial Sequence
  Synthetic Construct
ttttttttttttttttttgcttaaaaaaaa

SEQ ID NO: 59 - DNA, 30 bp, Artificial Sequence
  Synthetic Construct
tttttttttttttttttgcttaaaaaaaag

SEQ ID NO: 60 - DNA, 30 bp, Artificial Sequence
  Synthetic Construct
ttttttttttttttttgcttaaaaaaaagc

SEQ ID NO: 61 - DNA, 30 bp, Artificial Sequence
  Synthetic Construct
tttttttttttttttgcttaaaaaaaagcc

SEQ ID NO: 62 - DNA, 30 bp, Artificial Sequence
  Synthetic Construct
ttttttttttttttgcttaaaaaaaagcca

SEQ ID NO: 63 - DNA, 30 bp, Artificial Sequence
  Synthetic Construct
ttttttttttttgcttaaaaaaaagccatg

SEQ ID NO: 64 - DNA, 30 bp, Artificial Sequence
  Synthetic Construct
tttctaatttattttggatgtcaaaaggca

SEQ ID NO: 65 - DNA, 30 bp, Artificial Sequence
  Synthetic Construct
ctctggagtctccttctttctaacccggct

SEQ ID NO: 66 - DNA, 30 bp, Artificial Sequence
  Synthetic Construct
taatttattttggatgtcaaaaggcactga

SEQ ID NO: 67 - DNA, 30 bp, Artificial Sequence
  Synthetic Construct
cttacgcgagaattcccgtttgcttaagtg

SEQ ID NO: 68 - DNA, 30 bp, Artificial Sequence
  Synthetic Construct
cgcgagaattcccgtttgcttaagtgctgg

SEQ ID NO: 69 - DNA, 30 bp, Artificial Sequence
  Synthetic Construct
ccgtttgcttaagtgctggggtttgccttg

SEQ ID NO: 70 - DNA, 30 bp, Artificial Sequence
  Synthetic Construct
gcttaagtgctggggtttgccttgcttgcg

SEQ ID NO: 71 - DNA, 30 bp, Artificial Sequence
  Synthetic Construct
cttaagtgctggggtttgccttgcttgcgg

SEQ ID NO: 72 - DNA, 30 bp, Artificial Sequence
  Synthetic Construct
agtgctggggtttgccttgcttgcggcgag

SEQ ID NO: 73 - DNA, 30 bp, Artificial Sequence
  Synthetic Construct
gccttgcttgcggcgagacatggtgggctg

SEQ ID NO: 74 - DNA, 30 bp, Artificial Sequence
  Synthetic Construct
ccttgcttgcggcgagacatggtgggctgc

SEQ ID NO: 75 - DNA, 30 bp, Artificial Sequence
  Synthetic Construct
cttgcggcgagacatggtgggctgcggggc

SEQ ID NO: 76 - DNA, 30 bp, Artificial Sequence
  Synthetic Construct
cggcgagacatggtgggctgcggggcgggc

SEQ ID NO: 77 - DNA, 30 bp, Artificial Sequence
  Synthetic Construct
acatcgggagagccgggttagaaagaagga

SEQ ID NO: 78 - DNA, 30 bp, Artificial Sequence
  Synthetic Construct
gaaagaaggagactccagagaaaatatctt

SEQ ID NO: 79 - DNA, 30 bp, Artificial Sequence
  Synthetic Construct
atcagtgccttttgacatccaaaataaatt

SEQ ID NO: 80 - DNA, 30 bp, Artificial Sequence
  Synthetic Construct
tgggagagccgtcatggcttttttttaagc

SEQ ID NO: 81 - DNA, 30 bp, Artificial Sequence
  Synthetic Construct
gacatccaaaataaattagaaataatacaa

SEQ ID NO: 82 - DNA, 30 bp, Artificial Sequence
  Synthetic Construct
ggttacttacgcgagaattcccgtttgctt

SEQ ID NO: 83 - DNA, 30 bp, Artificial Sequence
  Synthetic Construct
ttgggttacttacgcgagaattcccgtttg

SEQ ID NO: 84 - DNA, 30 bp, Artificial Sequence
  Synthetic Construct
ctattattgggttacttacgcgagaattcc

SEQ ID NO: 85 - DNA, 30 bp, Artificial Sequence
  Synthetic Construct
ttactattattgggttacttacgcgagaat

SEQ ID NO: 86 - DNA, 30 bp, Artificial Sequence
  Synthetic Construct
attttggatgtcaaaaggcactgatgaaga

SEQ ID NO: 87 - DNA, 30 bp, Artificial Sequence
  Synthetic Construct
ttttggatgtcaaaaggcactgatgaagat

SEQ ID NO: 88 - DNA, 30 bp, Artificial Sequence
  Synthetic Construct
tggatgtcaaaaggcactgatgaagatatt

SEQ ID NO: 89 - DNA, 30 bp, Artificial Sequence
  Synthetic Construct
ggatgtcaaaaggcactgatgaagatattt

SEQ ID NO: 90 - DNA, 30 bp, Artificial Sequence
  Synthetic Construct
gatgtcaaaaggcactgatgaagatatttt

SEQ ID NO: 91 - DNA, 30 bp, Artificial Sequence
  Synthetic Construct
tctctggagtctccttctttctaacccggc

SEQ ID NO: 92 - DNA, 30 bp, Artificial Sequence
  Synthetic Construct
gccatttttttcatctctctctctctctct

SEQ ID NO: 93 - DNA, 30 bp, Artificial Sequence
  Synthetic Construct
ctaatttattttggatgtcaaaaggcactg

SEQ ID NO: 94 - DNA, 30 bp, Artificial Sequence
  Synthetic Construct
tctggagtctccttctttctaacccggctc

SEQ ID NO: 95 - DNA, 30 bp, Artificial Sequence
  Synthetic Construct
ctaacccggctctcccgatgtgaaccgagc

SEQ ID NO: 96 - DNA, 30 bp, Artificial Sequence
  Synthetic Construct
taacccggctctcccgatgtgaaccgagcc

SEQ ID NO: 97 - DNA, 30 bp, Artificial Sequence
  Synthetic Construct
agcaaacgggaattctcgcgtaagtaaccc

SEQ ID NO: 98 - DNA, 30 bp, Artificial Sequence
  Synthetic Construct
tcgcgtaagtaacccaataatagtaataat

SEQ ID NO: 99 - DNA, 30 bp, Artificial Sequence
  Synthetic Construct
ttaataattattattactattattgggtta

SEQ ID NO: 100 - DNA, 30 bp, Artificial Sequence
  Synthetic Construct
ataattattattactattattgggttactt

SEQ ID NO: 101 - DNA, 30 bp, Artificial Sequence
  Synthetic Construct
ttattactattattgggttacttacgcgag

SEQ ID NO: 102 - DNA, 30 bp, Artificial Sequence
  Synthetic Construct
tttctaacccggctctcccgatgtgaaccg

SEQ ID NO: 103 - DNA, 30 bp, Artificial Sequence
  Synthetic Construct
tgccatttttttcatctctctctctctctc

SEQ ID NO: 104 - DNA, 30 bp, Artificial Sequence
  Synthetic Construct
gaaataatacaaagatggcgcagggaagat

SEQ ID NO: 105 - DNA, 30 bp, Artificial Sequence
  Synthetic Construct
aacttgcagctcaggggggcttttgccatt

SEQ ID NO: 106 - DNA, 30 bp, Artificial Sequence
  Synthetic Construct
cagctcaggggggcttttgccatttttttc

SEQ ID NO: 107 - DNA, 30 bp, Artificial Sequence
  Synthetic Construct
ttttaagcaaaaaaaaaaaaaaaaaaaaaa

SEQ ID NO: 108 - DNA, 30 bp, Artificial Sequence
  Synthetic Construct
tttaagcaaaaaaaaaaaaaaaaaaaaaaa

SEQ ID NO: 109 - DNA, 30 bp, Artificial Sequence
  Synthetic Construct
ttaagcaaaaaaaaaaaaaaaaaaaaaaaa

SEQ ID NO: 110 - DNA, 30 bp, Artificial Sequence
  Synthetic Construct
taagcaaaaaaaaaaaaaaaaaaaaaaaaa

SEQ ID NO: 111 - DNA, 30 bp, Artificial Sequence
  Synthetic Construct
acatccaaaataaattagaaataatacaaa

SEQ ID NO: 112 - DNA, 30 bp, Artificial Sequence
  Synthetic Construct
tttttaagcaaaaaaaaaaaaaaaaaaaaa

SEQ ID NO: 113 - DNA, 30 bp, Artificial Sequence
  Synthetic Construct
agcaaaaaaaaaaaaaaaaaaaaaaaaaaa

SEQ ID NO: 114 - DNA, 30 bp, Artificial Sequence
  Synthetic Construct
aagtgcggacgtgacgtccctgcgaacttg

SEQ ID NO: 115 - DNA, 28 bp, Artificial Sequence
  Synthetic Construct
aacgtcaggagtctggatggacagagac

SEQ ID NO: 116 - DNA, 30 bp, Artificial Sequence
  Synthetic Construct
aagttcgcagggacgtcacgtccgcacttg

SEQ ID NO: 117 - DNA, 30 bp, Artificial Sequence
  Synthetic Construct
aagcaaaaaaaaaaaaaaaaaaaaaaaaaa

SEQ ID NO: 118 - DNA, 30 bp, Artificial Sequence
  Synthetic Construct
gcagggacgtcacgtccgcacttgaacttg

SEQ ID NO: 119 - DNA, 30 bp, Artificial Sequence
  Synthetic Construct
tatcgagcacaaacggaaacaatgcaatgg

SEQ ID NO: 120 - DNA, 30 bp, Artificial Sequence
  Synthetic Construct
atcgagcacaaacggaaacaatgcaatggc

SEQ ID NO: 121 - DNA, 30 bp, Artificial Sequence
  Synthetic Construct
tcgagcacaaacggaaacaatgcaatggca

SEQ ID NO: 122 - DNA, 30 bp, Artificial Sequence
  Synthetic Construct
gaaaaagctgtggataagccaccttcccct

SEQ ID NO: 123 - DNA, 30 bp, Artificial Sequence
  Synthetic Construct
gcatccaggtcacgccagaggatgacgatt

SEQ ID NO: 124 - DNA, 30 bp, Artificial Sequence
  Synthetic Construct
accaatcgagatgaaaaaagcatccaatcc

SEQ ID NO: 125 - DNA, 30 bp, Artificial Sequence
  Synthetic Construct
tttatcaacgtcatctagaggaatttgccc

SEQ ID NO: 126 - DNA, 30 bp, Artificial Sequence
  Synthetic Construct
atcaacgtcatctagaggaatttgccccaa

SEQ ID NO: 127 - DNA, 30 bp, Artificial Sequence
  Synthetic Construct
tcaacgtcatctagaggaatttgccccaaa

SEQ ID NO: 128 - DNA, 30 bp, Artificial Sequence
  Synthetic Construct
ttatcgagcacaaacggaaacaatgcaatg

SEQ ID NO: 129 - DNA, 30 bp, Artificial Sequence
  Synthetic Construct
cccttcaccaatcgagatgaaaaaagcatc

SEQ ID NO: 130 - DNA, 30 bp, Artificial Sequence
  Synthetic Construct
tttttatcgagcacaaacggaaacaatgca

SEQ ID NO: 131 - DNA, 30 bp, Artificial Sequence
  Synthetic Construct
aagccattcttacagatgatgaaccagacc

SEQ ID NO: 132 - DNA, 30 bp, Artificial Sequence
  Synthetic Construct
ggggacattcttatttttatcgagcacaaa

SEQ ID NO: 133 - DNA, 30 bp, Artificial Sequence
  Synthetic Construct
ccattgggggacattcttatttttatcgag

SEQ ID NO: 134 - DNA, 30 bp, Artificial Sequence
  Synthetic Construct
ggagctccagaaggggatcatgacctcctc

SEQ ID NO: 135 - DNA, 30 bp, Artificial Sequence
  Synthetic Construct
cagatgatgaaccagaccacggcccgttgg

SEQ ID NO: 136 - DNA, 30 bp, Artificial Sequence
  Synthetic Construct
ttacagatgatgaaccagaccacggcccgt

SEQ ID NO: 137 - DNA, 30 bp, Artificial Sequence
  Synthetic Construct
tccaaccacagccgagcctcttgaagccat

SEQ ID NO: 138 - DNA, 30 bp, Artificial Sequence
  Synthetic Construct
ctccaaccacagccgagcctcttgaagcca

SEQ ID NO: 139 - DNA, 30 bp, Artificial Sequence
  Synthetic Construct
tttctccaaccacagccgagcctcttgaag

SEQ ID NO: 140 - DNA, 30 bp, Artificial Sequence
  Synthetic Construct
gtttctccaaccacagccgagcctcttgaa

SEQ ID NO: 141 - DNA, 30 bp, Artificial Sequence
  Synthetic Construct
tgtttctccaaccacagccgagcctcttga

SEQ ID NO: 142 - DNA, 30 bp, Artificial Sequence
  Synthetic Construct
tgcttttgtttctccaaccacagccgagcc

SEQ ID NO: 143 - DNA, 30 bp, Artificial Sequence
  Synthetic Construct
ttatttttatcgagcacaaacggaaacaat

SEQ ID NO: 144 - DNA, 30 bp, Artificial Sequence
  Synthetic Construct
gccccaaacaggaacacatagcaggtaaat

SEQ ID NO: 145 - DNA, 30 bp, Artificial Sequence
  Synthetic Construct
tctccttgcttctcatttacctgctatgtg

SEQ ID NO: 146 - DNA, 30 bp, Artificial Sequence
  Synthetic Construct
ctccttgcttctcatttacctgctatgtgt

SEQ ID NO: 147 - DNA, 30 bp, Artificial Sequence
  Synthetic Construct
tctaagcagaggctgccattgcattgtttc

SEQ ID NO: 148 - DNA, 30 bp, Artificial Sequence
  Synthetic Construct
ctaagcagaggctgccattgcattgtttcc

SEQ ID NO: 149 - DNA, 30 bp, Artificial Sequence
  Synthetic Construct
taagcagaggctgccattgcattgtttccg

SEQ ID NO: 150 - DNA, 30 bp, Artificial Sequence
  Synthetic Construct
cattgtttccgtttgtgctcgataaaaata

SEQ ID NO: 151 - DNA, 30 bp, Artificial Sequence
  Synthetic Construct
tttccgtttgtgctcgataaaaataagaat

SEQ ID NO: 152 - DNA, 30 bp, Artificial Sequence
  Synthetic Construct
ccgtttgtgctcgataaaaataagaatgtc

SEQ ID NO: 153 - DNA, 30 bp, Artificial Sequence
  Synthetic Construct
ttctaagcagaggctgccattgcattgttt

SEQ ID NO: 154 - DNA, 30 bp, Artificial Sequence
  Synthetic Construct
cgtttgtgctcgataaaaataagaatgtcc

SEQ ID NO: 155 - DNA, 30 bp, Artificial Sequence
  Synthetic Construct
tgctcgataaaaataagaatgtcccccaat

SEQ ID NO: 156 - DNA, 30 bp, Artificial Sequence
  Synthetic Construct
atctggcactgcccacaggtgaggaggtca

SEQ ID NO: 157 - DNA, 30 bp, Artificial Sequence
  Synthetic Construct
atcatctgtaagaatggcttcaagaggctc

SEQ ID NO: 158 - DNA, 30 bp, Artificial Sequence
  Synthetic Construct
aagaggctcggctgtggttggagaaacaaa

SEQ ID NO: 159 - DNA, 30 bp, Artificial Sequence
  Synthetic Construct
gagaaacaaaagcacaattattagagtgcc

SEQ ID NO: 160 - DNA, 30 bp, Artificial Sequence
  Synthetic Construct
ttagagtgccagagaggacagaaaggggag

SEQ ID NO: 161 - DNA, 30 bp, Artificial Sequence
  Synthetic Construct
gtgctcgataaaaataagaatgtcccccaa

SEQ ID NO: 162 - DNA, 30 bp, Artificial Sequence
  Synthetic Construct
tccacagctttttctaagcagaggctgcca

SEQ ID NO: 163 - DNA, 30 bp, Artificial Sequence
  Synthetic Construct
gtgaaggggaaggtggcttatccacagctt

SEQ ID NO: 164 - DNA, 30 bp, Artificial Sequence
  Synthetic Construct
atctcgattggtgaaggggaaggtggctta

SEQ ID NO: 165 - DNA, 30 bp, Artificial Sequence
  Synthetic Construct
tccttgcttctcatttacctgctatgtgtt

SEQ ID NO: 166 - DNA, 30 bp, Artificial Sequence
  Synthetic Construct
cttctcatttacctgctatgtgttcctgtt

SEQ ID NO: 167 - DNA, 30 bp, Artificial Sequence
  Synthetic Construct
tcatttacctgctatgtgttcctgtttggg

SEQ ID NO: 168 - DNA, 30 bp, Artificial Sequence
  Synthetic Construct
acctgctatgtgttcctgtttggggcaaat

SEQ ID NO: 169 - DNA, 30 bp, Artificial Sequence
  Synthetic Construct
cctgctatgtgttcctgtttggggcaaatt

SEQ ID NO: 170 - DNA, 30 bp, Artificial Sequence
  Synthetic Construct
ctgtttggggcaaattcctctagatgacgt

SEQ ID NO: 171 - DNA, 30 bp, Artificial Sequence
  Synthetic Construct
ggggcaaattcctctagatgacgttgataa

SEQ ID NO: 172 - DNA, 30 bp, Artificial Sequence
  Synthetic Construct
gggcaaattcctctagatgacgttgataaa

SEQ ID NO: 173 - DNA, 30 bp, Artificial Sequence
  Synthetic Construct
ctctagatgacgttgataaacaatcgtcat

SEQ ID NO: 174 - DNA, 30 bp, Artificial Sequence
  Synthetic Construct
ataaacaatcgtcatcctctggcgtgacct

SEQ ID NO: 175 - DNA, 30 bp, Artificial Sequence
  Synthetic Construct
gatgcttttttcatctcgattggtgaaggg

SEQ ID NO: 176 - DNA, 30 bp, Artificial Sequence
  Synthetic Construct
tttcatctcgattggtgaaggggaaggtgg

SEQ ID NO: 177 - DNA, 30 bp, Artificial Sequence
  Synthetic Construct
ttcatctcgattggtgaaggggaaggtggc

SEQ ID NO: 178 - DNA, 30 bp, Artificial Sequence
  Synthetic Construct
tcatctcgattggtgaaggggaaggtggct

SEQ ID NO: 179 - DNA, 30 bp, Artificial Sequence
  Synthetic Construct
catctcgattggtgaaggggaaggtggctt

SEQ ID NO: 180 - DNA, 30 bp, Artificial Sequence
  Synthetic Construct
ccccaaacaggaacacatagcaggtaaatg

SEQ ID NO: 181 - DNA, 30 bp, Artificial Sequence
  Synthetic Construct
tggagctcccaacgggccgtggtctggttc

SEQ ID NO: 182 - DNA, 30 bp, Artificial Sequence
  Synthetic Construct
tttgtagctgtagtgcttgattttgggttt

SEQ ID NO: 183 - DNA, 30 bp, Artificial Sequence
  Synthetic Construct
tctgtgaaagaaacccaaaatcaagcacta

SEQ ID NO: 184 - DNA, 30 bp, Artificial Sequence
  Synthetic Construct
gtagctgtagtgcttgattttgggtttctt

SEQ ID NO: 185 - DNA, 30 bp, Artificial Sequence
  Synthetic Construct
tagctgtagtgcttgattttgggtttcttt

SEQ ID NO: 186 - DNA, 30 bp, Artificial Sequence
  Synthetic Construct
attttgggtttctttcacagataaacttct

SEQ ID NO: 187 - DNA, 30 bp, Artificial Sequence
  Synthetic Construct
tgggtttctttcacagataaacttctgcac

SEQ ID NO: 188 - DNA, 30 bp, Artificial Sequence
  Synthetic Construct
gggtttctttcacagataaacttctgcact

SEQ ID NO: 189 - DNA, 30 bp, Artificial Sequence
  Synthetic Construct
ctttcacagataaacttctgcactggaggg

SEQ ID NO: 190 - DNA, 30 bp, Artificial Sequence
  Synthetic Construct
tttcacagataaacttctgcactggagggg

SEQ ID NO: 191 - DNA, 30 bp, Artificial Sequence
  Synthetic Construct
cacagataaacttctgcactggaggggcct

SEQ ID NO: 192 - DNA, 30 bp, Artificial Sequence
  Synthetic Construct
acagataaacttctgcactggaggggcctc

SEQ ID NO: 193 - DNA, 30 bp, Artificial Sequence
  Synthetic Construct
tgcactggaggggcctctcctcccctcgtt

SEQ ID NO: 194 - DNA, 30 bp, Artificial Sequence
  Synthetic Construct
tgcacatggagctctaatccccacgcctgg

SEQ ID NO: 195 - DNA, 30 bp, Artificial Sequence
  Synthetic Construct
gtaagttgagccttatttcttctacaaatg

SEQ ID NO: 196 - DNA, 30 bp, Artificial Sequence
  Synthetic Construct
ggtttctttcacagataaacttctgcactg

SEQ ID NO: 197 - DNA, 30 bp, Artificial Sequence
  Synthetic Construct
agccttatttcttctacaaatgtccatgtg

SEQ ID NO: 198 - DNA, 30 bp, Artificial Sequence
  Synthetic Construct
taagttgagccttatttcttctacaaatgt

SEQ ID NO: 199 - DNA, 30 bp, Artificial Sequence
  Synthetic Construct
atctgtgaaagaaacccaaaatcaagcact

SEQ ID NO: 200 - DNA, 30 bp, Artificial Sequence
  Synthetic Construct
gagctccatgtgcagaacgaggggaggaga

SEQ ID NO: 201 - DNA, 30 bp, Artificial Sequence
  Synthetic Construct
tgcactcatcccaggcgtggggattagagc

SEQ ID NO: 202 - DNA, 30 bp, Artificial Sequence
  Synthetic Construct
tagaagaaataaggctcaacttacaaatac

SEQ ID NO: 203 - DNA, 30 bp, Artificial Sequence
  Synthetic Construct
caaataccctgcggggcatattctgcactc

SEQ ID NO: 204 - DNA, 30 bp, Artificial Sequence
  Synthetic Construct
gtagaagaaataaggctcaacttacaaata

SEQ ID NO: 205 - DNA, 30 bp, Artificial Sequence
  Synthetic Construct
tacaaatgtccatgtgtatagagatgagaa

SEQ ID NO: 206 - DNA, 30 bp, Artificial Sequence
  Synthetic Construct
ttctacaaatgtccatgtgtatagagatga

SEQ ID NO: 207 - DNA, 30 bp, Artificial Sequence
  Synthetic Construct
cttctacaaatgtccatgtgtatagagatg

SEQ ID NO: 208 - DNA, 30 bp, Artificial Sequence
  Synthetic Construct
tttcttctacaaatgtccatgtgtatagag

SEQ ID NO: 209 - DNA, 30 bp, Artificial Sequence
  Synthetic Construct
tttaaaaaaaatttttcttaacatttatat

SEQ ID NO: 210 - DNA, 30 bp, Artificial Sequence
  Synthetic Construct
aaaaaaaatttttcttaacatttatattta

SEQ ID NO: 211 - DNA, 30 bp, Artificial Sequence
  Synthetic Construct
taaaaaaaatttttcttaacatttatattt

SEQ ID NO: 212 - DNA, 30 bp, Artificial Sequence
  Synthetic Construct
ttaaaaaaaatttttcttaacatttatatt

SEQ ID NO: 213 - DNA, 30 bp, Artificial Sequence
  Synthetic Construct
aaaaaaatttttcttaacatttatatttaa

SEQ ID NO: 214 - DNA, 30 bp, Artificial Sequence
  Synthetic Construct
ccccctaaacataatgaagtgttttttaaa

SEQ ID NO: 215 - DNA, 30 bp, Artificial Sequence
  Synthetic Construct
cactaccatttttaaatggataacaagtct

SEQ ID NO: 216 - DNA, 30 bp, Artificial Sequence
  Synthetic Construct
aatggataacaagtcttgtaacaccaccaa

SEQ ID NO: 217 - DNA, 30 bp, Artificial Sequence
  Synthetic Construct
aaatggataacaagtcttgtaacaccacca

SEQ ID NO: 218 - DNA, 30 bp, Artificial Sequence
  Synthetic Construct
taaatggataacaagtcttgtaacaccacc

SEQ ID NO: 219 - DNA, 30 bp, Artificial Sequence
  Synthetic Construct
ttaaatggataacaagtcttgtaacaccac

SEQ ID NO: 220 - DNA, 30 bp, Artificial Sequence
  Synthetic Construct
ccactaccatttttaaatggataacaagtc

SEQ ID NO: 221 - DNA, 30 bp, Artificial Sequence
  Synthetic Construct
ttcttaacatttatatttaaaaaagttttg

SEQ ID NO: 222 - DNA, 30 bp, Artificial Sequence
  Synthetic Construct
taacaccaccaagacaatggaaccctaaaa

SEQ ID NO: 223 - DNA, 30 bp, Artificial Sequence
  Synthetic Construct
tcttaacatttatatttaaaaaagttttgt

SEQ ID NO: 224 - DNA, 30 bp, Artificial Sequence
  Synthetic Construct
ctatgttaagtgtattctgtttccattcac

SEQ ID NO: 225 - DNA, 30 bp, Artificial Sequence
  Synthetic Construct
ttaacatttatatttaaaaaagttttgtac

SEQ ID NO: 226 - DNA, 30 bp, Artificial Sequence
  Synthetic Construct
acatttatatttaaaaaagttttgtacaaa

SEQ ID NO: 227 - DNA, 30 bp, Artificial Sequence
  Synthetic Construct
atatttaaaaaagttttgtacaaaaaaatc

SEQ ID NO: 228 - DNA, 30 bp, Artificial Sequence
  Synthetic Construct
tatttaaaaaagttttgtacaaaaaaatcc

SEQ ID NO: 229 - DNA, 30 bp, Artificial Sequence
  Synthetic Construct
aaaaaagttttgtacaaaaaaatccttgca

SEQ ID NO: 230 - DNA, 30 bp, Artificial Sequence
  Synthetic Construct
aaaaagttttgtacaaaaaaatccttgcac

SEQ ID NO: 231 - DNA, 30 bp, Artificial Sequence
  Synthetic Construct
tgtacaaaaaaatccttgcactgtagaagc

SEQ ID NO: 232 - DNA, 30 bp, Artificial Sequence
  Synthetic Construct
gtacaaaaaaatccttgcactgtagaagcg

SEQ ID NO: 233 - DNA, 30 bp, Artificial Sequence
  Synthetic Construct
tacaaaaaaatccttgcactgtagaagcga

SEQ ID NO: 234 - DNA, 30 bp, Artificial Sequence
  Synthetic Construct
cactgtagaagcgaaagcaatcattcattt

SEQ ID NO: 235 - DNA, 30 bp, Artificial Sequence
  Synthetic Construct
atttctatgttaagtgtattctgtttccat

SEQ ID NO: 236 - DNA, 30 bp, Artificial Sequence
  Synthetic Construct
caacctgaagagcggtgtgtatccaaggca

SEQ ID NO: 237 - DNA, 30 bp, Artificial Sequence
  Synthetic Construct
tatgttaagtgtattctgtttccattcaca

SEQ ID NO: 238 - DNA, 30 bp, Artificial Sequence
  Synthetic Construct
agtgtattctgtttccattcacagcgcttg

SEQ ID NO: 239 - DNA, 30 bp, Artificial Sequence
  Synthetic Construct
cttaacatttatatttaaaaaagttttgta

SEQ ID NO: 240 - DNA, 30 bp, Artificial Sequence
  Synthetic Construct
acaacctgaagagcggtgtgtatccaaggc

SEQ ID NO: 241 - DNA, 30 bp, Artificial Sequence
  Synthetic Construct
agtactatataatcttaaacctttccccaa

SEQ ID NO: 242 - DNA, 30 bp, Artificial Sequence
  Synthetic Construct
ttacaacctgaagagcggtgtgtatccaag

SEQ ID NO: 243 - DNA, 30 bp, Artificial Sequence
  Synthetic Construct
tccactaccaaaaaaggtacattgatacct

SEQ ID NO: 244 - DNA, 30 bp, Artificial Sequence
  Synthetic Construct
ccactaccaaaaaaggtacattgatacctt

SEQ ID NO: 245 - DNA, 30 bp, Artificial Sequence
  Synthetic Construct
cactaccaaaaaaggtacattgataccttt

SEQ ID NO: 246 - DNA, 30 bp, Artificial Sequence
  Synthetic Construct
ataccttttaagagaacaagcaacagttaa

SEQ ID NO: 247 - DNA, 30 bp, Artificial Sequence
  Synthetic Construct
taagagaacaagcaacagttaaaaatacaa

SEQ ID NO: 248 - DNA, 30 bp, Artificial Sequence
  Synthetic Construct
aagagaacaagcaacagttaaaaatacaag

SEQ ID NO: 249 - DNA, 30 bp, Artificial Sequence
  Synthetic Construct
agagaacaagcaacagttaaaaatacaagc

SEQ ID NO: 250 - DNA, 30 bp, Artificial Sequence
  Synthetic Construct
aaaatacaagcttcaatataaatactatag

SEQ ID NO: 251 - DNA, 30 bp, Artificial Sequence
  Synthetic Construct
aatataaatactatagtgcctaacactaga

SEQ ID NO: 252 - DNA, 30 bp, Artificial Sequence
  Synthetic Construct
aattcaaataccattctagaaatacagaaa

SEQ ID NO: 253 - DNA, 30 bp, Artificial Sequence
  Synthetic Construct
attcaaataccattctagaaatacagaaaa

SEQ ID NO: 254 - DNA, 30 bp, Artificial Sequence
  Synthetic Construct
aaataccattctagaaatacagaaaaaaga

SEQ ID NO: 255 - DNA, 30 bp, Artificial Sequence
  Synthetic Construct
tagaaatacagaaaaaagaccataaatgta

SEQ ID NO: 256 - DNA, 30 bp, Artificial Sequence
  Synthetic Construct
tagcataggaatcaacatgagtgtgcattt

SEQ ID NO: 257 - DNA, 30 bp, Artificial Sequence
  Synthetic Construct
agcataggaatcaacatgagtgtgcatttt

SEQ ID NO: 258 - DNA, 30 bp, Artificial Sequence
  Synthetic Construct
gcataggaatcaacatgagtgtgcattttc

SEQ ID NO: 259 - DNA, 30 bp, Artificial Sequence
  Synthetic Construct
tcctatatttaagtactatataatcttaaa

SEQ ID NO: 260 - DNA, 30 bp, Artificial Sequence
  Synthetic Construct
tttacaacctgaagagcggtgtgtatccaa

SEQ ID NO: 261 - DNA, 30 bp, Artificial Sequence
  Synthetic Construct
ttttacaacctgaagagcggtgtgtatcca

SEQ ID NO: 262 - DNA, 30 bp, Artificial Sequence
  Synthetic Construct
tttttacaacctgaagagcggtgtgtatcc

SEQ ID NO: 263 - DNA, 30 bp, Artificial Sequence
  Synthetic Construct
ttttttacaacctgaagagcggtgtgtatc

SEQ ID NO: 264 - DNA, 30 bp, Artificial Sequence
  Synthetic Construct
tttttttacaacctgaagagcggtgtgtat

SEQ ID NO: 265 - DNA, 30 bp, Artificial Sequence
  Synthetic Construct
ttttttttacaacctgaagagcggtgtgta

SEQ ID NO: 266 - DNA, 30 bp, Artificial Sequence
  Synthetic Construct
tacaacctgaagagcggtgtgtatccaagg

SEQ ID NO: 267 - DNA, 30 bp, Artificial Sequence
  Synthetic Construct
tttttttttacaacctgaagagcggtgtgt

SEQ ID NO: 268 - DNA, 30 bp, Artificial Sequence
  Synthetic Construct
ccccaatgtatgttttttttttttacaacc

SEQ ID NO: 269 - DNA, 30 bp, Artificial Sequence
  Synthetic Construct
aacctttccccaatgtatgttttttttttt

SEQ ID NO: 270 - DNA, 30 bp, Artificial Sequence
  Synthetic Construct
tgtttccattcacagcgcttgcaatgttgc

SEQ ID NO: 271 - DNA, 30 bp, Artificial Sequence
  Synthetic Construct
aagtactatataatcttaaacctttcccca

SEQ ID NO: 272 - DNA, 30 bp, Artificial Sequence
  Synthetic Construct
ctatatttaagtactatataatcttaaacc

SEQ ID NO: 273 - DNA, 30 bp, Artificial Sequence
  Synthetic Construct
cctatatttaagtactatataatcttaaac

SEQ ID NO: 274 - DNA, 30 bp, Artificial Sequence
  Synthetic Construct
cccaatgtatgttttttttttttacaacct

SEQ ID NO: 275 - DNA, 30 bp, Artificial Sequence
  Synthetic Construct
ccattcacagcgcttgcaatgttgcgtcca

SEQ ID NO: 276 - DNA, 30 bp, Artificial Sequence
  Synthetic Construct
ttagtttttaaaaaatgctcctcaatgaga

SEQ ID NO: 277 - DNA, 30 bp, Artificial Sequence
  Synthetic Construct
acagcgcttgcaatgttgcgtccaagtaag

SEQ ID NO: 278 - DNA, 30 bp, Artificial Sequence
  Synthetic Construct
tcctatctgagcaggtttattttatactca

SEQ ID NO: 279 - DNA, 30 bp, Artificial Sequence
  Synthetic Construct
attttatactcaacctctgtatctctgatt

SEQ ID NO: 280 - DNA, 30 bp, Artificial Sequence
  Synthetic Construct
ttttatactcaacctctgtatctctgatta

SEQ ID NO: 281 - DNA, 30 bp, Artificial Sequence
  Synthetic Construct
tatactcaacctctgtatctctgattagag

SEQ ID NO: 282 - DNA, 30 bp, Artificial Sequence
  Synthetic Construct
atactcaacctctgtatctctgattagaga

SEQ ID NO: 283 - DNA, 30 bp, Artificial Sequence
  Synthetic Construct
tactcaacctctgtatctctgattagagaa

SEQ ID NO: 284 - DNA, 30 bp, Artificial Sequence
  Synthetic Construct
gagaaaagatacagatatcacaggcagagt

SEQ ID NO: 285 - DNA, 30 bp, Artificial Sequence
  Synthetic Construct
gaacaccaactggggcagatgctagcttaa

SEQ ID NO: 286 - DNA, 30 bp, Artificial Sequence
  Synthetic Construct
aacaccaactggggcagatgctagcttaat

SEQ ID NO: 287 - DNA, 30 bp, Artificial Sequence
  Synthetic Construct
ataaaaaagaaaaaattaaaaaaataaaaa

SEQ ID NO: 288 - DNA, 30 bp, Artificial Sequence
  Synthetic Construct
aaaaaataaaaataaaaacaatgaatcctc

SEQ ID NO: 289 - DNA, 30 bp, Artificial Sequence
  Synthetic Construct
catgttaacacaaatagcacacagtgtatg

SEQ ID NO: 290 - DNA, 30 bp, Artificial Sequence
  Synthetic Construct
acacaaatagcacacagtgtatggaaaaga

SEQ ID NO: 291 - DNA, 30 bp, Artificial Sequence
  Synthetic Construct
tagggagcacagacatatatactgctactc

SEQ ID NO: 292 - DNA, 30 bp, Artificial Sequence
  Synthetic Construct
agggagcacagacatatatactgctactct

SEQ ID NO: 293 - DNA, 30 bp, Artificial Sequence
  Synthetic Construct
gggagcacagacatatatactgctactctt

SEQ ID NO: 294 - DNA, 30 bp, Artificial Sequence
  Synthetic Construct
aaattctttctcttctttttttaagaatgt

SEQ ID NO: 295 - DNA, 30 bp, Artificial Sequence
  Synthetic Construct
atagttaatcatcattgtatcaatattagc

SEQ ID NO: 296 - DNA, 30 bp, Artificial Sequence
  Synthetic Construct
agaattcatagttaatcatcattgtatcaa

SEQ ID NO: 297 - DNA, 30 bp, Artificial Sequence
  Synthetic Construct
aatgcaagtcttaagaattcatagttaatc

SEQ ID NO: 298 - DNA, 30 bp, Artificial Sequence
  Synthetic Construct
aaatgcaagtcttaagaattcatagttaat

SEQ ID NO: 299 - DNA, 30 bp, Artificial Sequence
  Synthetic Construct
agaatgtcacatttaaatgcaagtcttaag

SEQ ID NO: 300 - DNA, 30 bp, Artificial Sequence
  Synthetic Construct
aagaatgtcacatttaaatgcaagtcttaa

SEQ ID NO: 301 - DNA, 30 bp, Artificial Sequence
  Synthetic Construct
attgtcctatctgagcaggtttattttata

SEQ ID NO: 302 - DNA, 30 bp, Artificial Sequence
  Synthetic Construct
taagaatgtcacatttaaatgcaagtctta

SEQ ID NO: 303 - DNA, 30 bp, Artificial Sequence
  Synthetic Construct
tttaagaatgtcacatttaaatgcaagtct

SEQ ID NO: 304 - DNA, 30 bp, Artificial Sequence
  Synthetic Construct
ttttaagaatgtcacatttaaatgcaagtc

SEQ ID NO: 305 - DNA, 30 bp, Artificial Sequence
  Synthetic Construct
tttttttaagaatgtcacatttaaatgcaa

SEQ ID NO: 306 - DNA, 30 bp, Artificial Sequence
  Synthetic Construct
tcttctttttttaagaatgtcacatttaaa

SEQ ID NO: 307 - DNA, 30 bp, Artificial Sequence
  Synthetic Construct
ctcttctttttttaagaatgtcacatttaa

SEQ ID NO: 308 - DNA, 30 bp, Artificial Sequence
  Synthetic Construct
tttctcttctttttttaagaatgtcacatt

SEQ ID NO: 309 - DNA, 30 bp, Artificial Sequence
  Synthetic Construct
ttaagaatgtcacatttaaatgcaagtctt

SEQ ID NO: 310 - DNA, 30 bp, Artificial Sequence
  Synthetic Construct
cattcacagcgcttgcaatgttgcgtccaa

SEQ ID NO: 311 - DNA, 30 bp, Artificial Sequence
  Synthetic Construct
tacagtgcacttaattgtcctatctgagca

SEQ ID NO: 312 - DNA, 30 bp, Artificial Sequence
  Synthetic Construct
ccttaagtatagacctgtaaactgggaaaa

SEQ ID NO: 313 - DNA, 30 bp, Artificial Sequence
  Synthetic Construct
caatgttgcgtccaagtaagtaagctcaat

SEQ ID NO: 314 - DNA, 30 bp, Artificial Sequence
  Synthetic Construct
cgtccaagtaagtaagctcaatagtcaagt

SEQ ID NO: 315 - DNA, 30 bp, Artificial Sequence
  Synthetic Construct
ttttttttttagtttttaaaaaatgctcct

SEQ ID NO: 316 - DNA, 30 bp, Artificial Sequence
  Synthetic Construct
tttttttttagtttttaaaaaatgctcctc

SEQ ID NO: 317 - DNA, 30 bp, Artificial Sequence
  Synthetic Construct
ttttttttagtttttaaaaaatgctcctca

SEQ ID NO: 318 - DNA, 30 bp, Artificial Sequence
  Synthetic Construct
tttttttagtttttaaaaaatgctcctcaa

SEQ ID NO: 319 - DNA, 30 bp, Artificial Sequence
  Synthetic Construct
ttttttagtttttaaaaaatgctcctcaat

SEQ ID NO: 320 - DNA, 30 bp, Artificial Sequence
  Synthetic Construct
tttttagtttttaaaaaatgctcctcaatg

SEQ ID NO: 321 - DNA, 30 bp, Artificial Sequence
  Synthetic Construct
ttttagtttttaaaaaatgctcctcaatga

SEQ ID NO: 322 - DNA, 30 bp, Artificial Sequence
  Synthetic Construct
tttagtttttaaaaaatgctcctcaatgag

SEQ ID NO: 323 - DNA, 30 bp, Artificial Sequence
  Synthetic Construct
ttccactaccaaaaaaggtacattgatacc

SEQ ID NO: 324 - DNA, 30 bp, Artificial Sequence
  Synthetic Construct
tagtttttaaaaaatgctcctcaatgagat

SEQ ID NO: 325 - DNA, 30 bp, Artificial Sequence
  Synthetic Construct
agtttttaaaaaatgctcctcaatgagatt

SEQ ID NO: 326 - DNA, 30 bp, Artificial Sequence
  Synthetic Construct
gtttttaaaaaatgctcctcaatgagattg

SEQ ID NO: 327 - DNA, 30 bp, Artificial Sequence
  Synthetic Construct
ttaaaaaatgctcctcaatgagattgtgtt

SEQ ID NO: 328 - DNA, 30 bp, Artificial Sequence
  Synthetic Construct
taaaaaatgctcctcaatgagattgtgttc

SEQ ID NO: 329 - DNA, 30 bp, Artificial Sequence
  Synthetic Construct
aaaaaatgctcctcaatgagattgtgttca

SEQ ID NO: 330 - DNA, 30 bp, Artificial Sequence
  Synthetic Construct
cccttaagtatagacctgtaaactgggaaa

SEQ ID NO: 331 - DNA, 30 bp, Artificial Sequence
  Synthetic Construct
tcccttaagtatagacctgtaaactgggaa

SEQ ID NO: 332 - DNA, 30 bp, Artificial Sequence
  Synthetic Construct
caacttttcccttaagtatagacctgtaaa

SEQ ID NO: 333 - DNA, 30 bp, Artificial Sequence
  Synthetic Construct
ttgcaacttttcccttaagtatagacctgt

SEQ ID NO: 334 - DNA, 30 bp, Artificial Sequence
  Synthetic Construct
agcattcttgcaacttttcccttaagtata

SEQ ID NO: 335 - DNA, 30 bp, Artificial Sequence
  Synthetic Construct
cagcattcttgcaacttttcccttaagtat

SEQ ID NO: 336 - DNA, 30 bp, Artificial Sequence
  Synthetic Construct
agtatagacctgtaaactgggaaaattgta

SEQ ID NO: 337 - DNA, 30 bp, Artificial Sequence
  Synthetic Construct
tcagcattcttgcaacttttcccttaagta

SEQ ID NO: 338 - DNA, 30 bp, Artificial Sequence
  Synthetic Construct
tttcagcattcttgcaacttttcccttaag

SEQ ID NO: 339 - DNA, 30 bp, Artificial Sequence
  Synthetic Construct
ttttcagcattcttgcaacttttcccttaa

SEQ ID NO: 340 - DNA, 30 bp, Artificial Sequence
  Synthetic Construct
tttttcagcattcttgcaacttttccctta

SEQ ID NO: 341 - DNA, 30 bp, Artificial Sequence
  Synthetic Construct
aattttttttcagcattcttgcaacttttc

SEQ ID NO: 342 - DNA, 30 bp, Artificial Sequence
  Synthetic Construct
tgttcaattttttttcagcattcttgcaac

SEQ ID NO: 343 - DNA, 30 bp, Artificial Sequence
  Synthetic Construct
aaaaatgctcctcaatgagattgtgttcaa

SEQ ID NO: 344 - DNA, 30 bp, Artificial Sequence
  Synthetic Construct
ttcagcattcttgcaacttttcccttaagt

SEQ ID NO: 345 - DNA, 30 bp, Artificial Sequence
  Synthetic Construct
tttccactaccaaaaaaggtacattgatac

SEQ ID NO: 346 - DNA, 30 bp, Artificial Sequence
  Synthetic Construct
caatagaacttaacaaagaccagaaacaaa

SEQ ID NO: 347 - DNA, 30 bp, Artificial Sequence
  Synthetic Construct
tttttccactaccaaaaaaggtacattgat

SEQ ID NO: 348 - DNA, 30 bp, Artificial Sequence
  Synthetic Construct
ttccaatagaacttaacaaagaccagaaac

SEQ ID NO: 349 - DNA, 30 bp, Artificial Sequence
  Synthetic Construct
tccaatagaacttaacaaagaccagaaaca

SEQ ID NO: 350 - DNA, 30 bp, Artificial Sequence
  Synthetic Construct
ccaatagaacttaacaaagaccagaaacaa

SEQ ID NO: 351 - DNA, 30 bp, Artificial Sequence
  Synthetic Construct
atcatcattgtatcaatattagcttatata

SEQ ID NO: 352 - DNA, 30 bp, Artificial Sequence
  Synthetic Construct
acaaagaccagaaacaaatacaataaaaag

SEQ ID NO: 353 - DNA, 30 bp, Artificial Sequence
  Synthetic Construct
taatgacctttggtcatctaaataaaaaaa

SEQ ID NO: 354 - DNA, 30 bp, Artificial Sequence
  Synthetic Construct
ggtcatctaaataaaaaaaaaaataaaaac

SEQ ID NO: 355 - DNA, 30 bp, Artificial Sequence
  Synthetic Construct
gtcatctaaataaaaaaaaaaataaaaaca

SEQ ID NO: 356 - DNA, 30 bp, Artificial Sequence
  Synthetic Construct
agtgcctctgttttgaacagggcacataag

SEQ ID NO: 357 - DNA, 30 bp, Artificial Sequence
  Synthetic Construct
tgaacagggcacataagcaataataaatag

SEQ ID NO: 358 - DNA, 30 bp, Artificial Sequence
  Synthetic Construct
gaacagggcacataagcaataataaatagt

SEQ ID NO: 359 - DNA, 30 bp, Artificial Sequence
  Synthetic Construct
aacagggcacataagcaataataaatagtg

SEQ ID NO: 360 - DNA, 30 bp, Artificial Sequence
  Synthetic Construct
caagttacgacaaacagctttcattacagg

SEQ ID NO: 361 - DNA, 30 bp, Artificial Sequence
  Synthetic Construct
aagttacgacaaacagctttcattacagga

SEQ ID NO: 362 - DNA, 30 bp, Artificial Sequence
  Synthetic Construct
atgcagacaactgccaaaaaaacacagaca

SEQ ID NO: 363 - DNA, 30 bp, Artificial Sequence
  Synthetic Construct
cgacaaacagctttcattacaggaatagaa

SEQ ID NO: 364 - DNA, 30 bp, Artificial Sequence
  Synthetic Construct
attacaggaatagaaaaggccaataacaaa

SEQ ID NO: 365 - DNA, 30 bp, Artificial Sequence
  Synthetic Construct
caggaatagaaaaggccaataacaaaatat

SEQ ID NO: 366 - DNA, 30 bp, Artificial Sequence
  Synthetic Construct
tgcattgccatttacaaaaaagtattgact

SEQ ID NO: 367 - DNA, 30 bp, Artificial Sequence
  Synthetic Construct
ccatttacaaaaaagtattgactaaagcgg

SEQ ID NO: 368 - DNA, 30 bp, Artificial Sequence
  Synthetic Construct
acaaaaaagtattgactaaagcgggctttc

SEQ ID NO: 369 - DNA, 30 bp, Artificial Sequence
  Synthetic Construct
caaaaaagtattgactaaagcgggctttct

SEQ ID NO: 370 - DNA, 30 bp, Artificial Sequence
  Synthetic Construct
actaaagcgggctttctctttaatatgctt

SEQ ID NO: 371 - DNA, 30 bp, Artificial Sequence
  Synthetic Construct
ctctttaatatgctttgcatatgaaattct

SEQ ID NO: 372 - DNA, 30 bp, Artificial Sequence
  Synthetic Construct
tctttaatatgctttgcatatgaaattctt

SEQ ID NO: 373 - DNA, 30 bp, Artificial Sequence
  Synthetic Construct
aatatgctttgcatatgaaattctttccaa

SEQ ID NO: 374 - DNA, 30 bp, Artificial Sequence
  Synthetic Construct
atatgctttgcatatgaaattctttccaat

SEQ ID NO: 375 - DNA, 30 bp, Artificial Sequence
  Synthetic Construct
gcatatgaaattctttccaatctaaatata

SEQ ID NO: 376 - DNA, 30 bp, Artificial Sequence
  Synthetic Construct
catatgaaattctttccaatctaaatataa

SEQ ID NO: 377 - DNA, 30 bp, Artificial Sequence
  Synthetic Construct
tttccaatctaaatataaagcaccatttag

SEQ ID NO: 378 - DNA, 30 bp, Artificial Sequence
  Synthetic Construct
cattacaggaatagaaaaggccaataacaa

SEQ ID NO: 379 - DNA, 30 bp, Artificial Sequence
  Synthetic Construct
aataaagggacaaaatgggtgtatgaacag

SEQ ID NO: 380 - DNA, 30 bp, Artificial Sequence
  Synthetic Construct
caataaagggacaaaatgggtgtatgaaca

SEQ ID NO: 381 - DNA, 30 bp, Artificial Sequence
  Synthetic Construct
tcaataaagggacaaaatgggtgtatgaac

SEQ ID NO: 382 - DNA, 30 bp, Artificial Sequence
  Synthetic Construct
ggcagttgtctgcattaacctgttcataca

SEQ ID NO: 383 - DNA, 30 bp, Artificial Sequence
  Synthetic Construct
gcagttgtctgcattaacctgttcatacac

SEQ ID NO: 384 - DNA, 30 bp, Artificial Sequence
  Synthetic Construct
tctgcattaacctgttcatacacccatttt

SEQ ID NO: 385 - DNA, 30 bp, Artificial Sequence
  Synthetic Construct
acctgttcatacacccattttgtcccttta

SEQ ID NO: 386 - DNA, 30 bp, Artificial Sequence
  Synthetic Construct
atacacccattttgtccctttattgaaaaa

SEQ ID NO: 387 - DNA, 30 bp, Artificial Sequence
  Synthetic Construct
tgtccctttattgaaaaaataaaaaaaatt

SEQ ID NO: 388 - DNA, 30 bp, Artificial Sequence
  Synthetic Construct
gtccctttattgaaaaaataaaaaaaatta

SEQ ID NO: 389 - DNA, 30 bp, Artificial Sequence
  Synthetic Construct
tccctttattgaaaaaataaaaaaaattaa

SEQ ID NO: 390 - DNA, 30 bp, Artificial Sequence
  Synthetic Construct
attgaaaaaataaaaaaaattaaagtacac

SEQ ID NO: 391 - DNA, 30 bp, Artificial Sequence
  Synthetic Construct
ttgaaaaaataaaaaaaattaaagtacaca

SEQ ID NO: 392 - DNA, 30 bp, Artificial Sequence
  Synthetic Construct
aaaaaataaaaaaaattaaagtacacattg

SEQ ID NO: 393 - DNA, 30 bp, Artificial Sequence
  Synthetic Construct
aagtacacattgtaagcttcttgtgtcctc

SEQ ID NO: 394 - DNA, 30 bp, Artificial Sequence
  Synthetic Construct
taagcttcttgtgtcctcatttgacacact

SEQ ID NO: 395 - DNA, 30 bp, Artificial Sequence
  Synthetic Construct
ttgtgtcctcatttgacacactctgtaaat

SEQ ID NO: 396 - DNA, 30 bp, Artificial Sequence
  Synthetic Construct
tgtcctcatttgacacactctgtaaattac

SEQ ID NO: 397 - DNA, 30 bp, Artificial Sequence
  Synthetic Construct
gacacactctgtaaattacttgcaagaaaa

SEQ ID NO: 398 - DNA, 30 bp, Artificial Sequence
  Synthetic Construct
acacactctgtaaattacttgcaagaaaat

SEQ ID NO: 399 - DNA, 30 bp, Artificial Sequence
  Synthetic Construct
ttcaataaagggacaaaatgggtgtatgaa

SEQ ID NO: 400 - DNA, 30 bp, Artificial Sequence
  Synthetic Construct
tttcaataaagggacaaaatgggtgtatga

SEQ ID NO: 401 - DNA, 30 bp, Artificial Sequence
  Synthetic Construct
ttttttcaataaagggacaaaatgggtgta

SEQ ID NO: 402 - DNA, 30 bp, Artificial Sequence
  Synthetic Construct
attttttcaataaagggacaaaatgggtgt

SEQ ID NO: 403 - DNA, 30 bp, Artificial Sequence
  Synthetic Construct
tattttttcaataaagggacaaaatgggtg

SEQ ID NO: 404 - DNA, 30 bp, Artificial Sequence
  Synthetic Construct
ttattttttcaataaagggacaaaatgggt

SEQ ID NO: 405 - DNA, 30 bp, Artificial Sequence
  Synthetic Construct
ccaatctaaatataaagcaccatttagttt

SEQ ID NO: 406 - DNA, 30 bp, Artificial Sequence
  Synthetic Construct
tttattttttcaataaagggacaaaatggg

SEQ ID NO: 407 - DNA, 30 bp, Artificial Sequence
  Synthetic Construct
tttttattttttcaataaagggacaaaatg

SEQ ID NO: 408 - DNA, 30 bp, Artificial Sequence
  Synthetic Construct
attttttttattttttcaataaagggacaa

SEQ ID NO: 409 - DNA, 30 bp, Artificial Sequence
  Synthetic Construct
aattttttttattttttcaataaagggaca

SEQ ID NO: 410 - DNA, 30 bp, Artificial Sequence
  Synthetic Construct
caatgtgtactttaattttttttatttttt

SEQ ID NO: 411 - DNA, 30 bp, Artificial Sequence
  Synthetic Construct
cagagtgtgtcaaatgaggacacaagaagc

SEQ ID NO: 412 - DNA, 30 bp, Artificial Sequence
  Synthetic Construct
acagagtgtgtcaaatgaggacacaagaag

SEQ ID NO: 413 - DNA, 30 bp, Artificial Sequence
  Synthetic Construct
ttttattttttcaataaagggacaaaatgg

SEQ ID NO: 414 - DNA, 30 bp, Artificial Sequence
  Synthetic Construct
caatctaaatataaagcaccatttagtttt

SEQ ID NO: 415 - DNA, 30 bp, Artificial Sequence
  Synthetic Construct
agtttttggcaatgaaaaaaactgcaaaac

SEQ ID NO: 416 - DNA, 30 bp, Artificial Sequence
  Synthetic Construct
gtttttggcaatgaaaaaaactgcaaaaca

SEQ ID NO: 417 - DNA, 30 bp, Artificial Sequence
  Synthetic Construct
gcttgcagtactgcatacagtatggcagca

SEQ ID NO: 418 - DNA, 30 bp, Artificial Sequence
  Synthetic Construct
cagtactgcatacagtatggcagcaggaaa

SEQ ID NO: 419 - DNA, 30 bp, Artificial Sequence
  Synthetic Construct
tagcaggctcccccaaaccgccattatatg

SEQ ID NO: 420 - DNA, 30 bp, Artificial Sequence
  Synthetic Construct
tatggcttctcatctgtaatgtcacacttt

SEQ ID NO: 421 - DNA, 30 bp, Artificial Sequence
  Synthetic Construct
tcatctgtaatgtcacacttttttgtttct

SEQ ID NO: 422 - DNA, 30 bp, Artificial Sequence
  Synthetic Construct
tttgtttctctcttttttttttttttgaag

SEQ ID NO: 423 - DNA, 30 bp, Artificial Sequence
  Synthetic Construct
ttgtttctctcttttttttttttttgaagc

SEQ ID NO: 424 - DNA, 30 bp, Artificial Sequence
  Synthetic Construct
tgtttctctcttttttttttttttgaagca

SEQ ID NO: 425 - DNA, 30 bp, Artificial Sequence
  Synthetic Construct
gtttctctcttttttttttttttgaagcat

SEQ ID NO: 426 - DNA, 30 bp, Artificial Sequence
  Synthetic Construct
tttctctcttttttttttttttgaagcata

SEQ ID NO: 427 - DNA, 30 bp, Artificial Sequence
  Synthetic Construct
ctctcttttttttttttttgaagcatacaa

SEQ ID NO: 428 - DNA, 30 bp, Artificial Sequence
  Synthetic Construct
tctcttttttttttttttgaagcatacaaa

SEQ ID NO: 429 - DNA, 30 bp, Artificial Sequence
  Synthetic Construct
tttttttttttgaagcatacaaataatttg

SEQ ID NO: 430 - DNA, 30 bp, Artificial Sequence
  Synthetic Construct
ttttttttttgaagcatacaaataatttgc

SEQ ID NO: 431 - DNA, 30 bp, Artificial Sequence
  Synthetic Construct
tttttttttgaagcatacaaataatttgca

SEQ ID NO: 432 - DNA, 30 bp, Artificial Sequence
  Synthetic Construct
ttttttttgaagcatacaaataatttgcac

SEQ ID NO: 433 - DNA, 30 bp, Artificial Sequence
  Synthetic Construct
tttttttgaagcatacaaataatttgcact

SEQ ID NO: 434 - DNA, 30 bp, Artificial Sequence
  Synthetic Construct
ttttttccactaccaaaaaaggtacattga

SEQ ID NO: 435 - DNA, 30 bp, Artificial Sequence
  Synthetic Construct
tttttttccactaccaaaaaaggtacattg

SEQ ID NO: 436 - DNA, 30 bp, Artificial Sequence
  Synthetic Construct
aaaaaatatactgtggcagcctgtcttttt

SEQ ID NO: 437 - DNA, 30 bp, Artificial Sequence
  Synthetic Construct
tcctgccaaattaaaaaaatatactgtggc

SEQ ID NO: 438 - DNA, 30 bp, Artificial Sequence
  Synthetic Construct
cactatattatcctgccaaattaaaaaaat

SEQ ID NO: 439 - DNA, 30 bp, Artificial Sequence
  Synthetic Construct
gcactatattatcctgccaaattaaaaaaa

SEQ ID NO: 440 - DNA, 30 bp, Artificial Sequence
  Synthetic Construct
ttagcttgcagtactgcatacagtatggca

SEQ ID NO: 441 - DNA, 30 bp, Artificial Sequence
  Synthetic Construct
aagcatacaaataatttgcactatattatc

SEQ ID NO: 442 - DNA, 30 bp, Artificial Sequence
  Synthetic Construct
tgaagcatacaaataatttgcactatatta

SEQ ID NO: 443 - DNA, 30 bp, Artificial Sequence
  Synthetic Construct
ttgaagcatacaaataatttgcactatatt

SEQ ID NO: 444 - DNA, 30 bp, Artificial Sequence
  Synthetic Construct
tttgaagcatacaaataatttgcactatat

SEQ ID NO: 445 - DNA, 30 bp, Artificial Sequence
  Synthetic Construct
ttttgaagcatacaaataatttgcactata

SEQ ID NO: 446 - DNA, 30 bp, Artificial Sequence
  Synthetic Construct
tttttgaagcatacaaataatttgcactat

SEQ ID NO: 447 - DNA, 30 bp, Artificial Sequence
  Synthetic Construct
ttttttgaagcatacaaataatttgcacta

SEQ ID NO: 448 - DNA, 30 bp, Artificial Sequence
  Synthetic Construct
gaagcatacaaataatttgcactatattat

SEQ ID NO: 449 - DNA, 30 bp, Artificial Sequence
  Synthetic Construct
ttttccactaccaaaaaaggtacattgata

SEQ ID NO: 450 - DNA, 30 bp, Artificial Sequence
  Synthetic Construct
ctgcatatgaaggtaagatgctggaatgta

SEQ ID NO: 451 - DNA, 30 bp, Artificial Sequence
  Synthetic Construct
tactgcatatgaaggtaagatgctggaatg

SEQ ID NO: 452 - DNA, 30 bp, Artificial Sequence
  Synthetic Construct
ttggcaatgaaaaaaactgcaaaacattgg

SEQ ID NO: 453 - DNA, 30 bp, Artificial Sequence
  Synthetic Construct
tggcaatgaaaaaaactgcaaaacattggt

SEQ ID NO: 454 - DNA, 30 bp, Artificial Sequence
  Synthetic Construct
ggcaatgaaaaaaactgcaaaacattggtt

SEQ ID NO: 455 - DNA, 30 bp, Artificial Sequence
  Synthetic Construct
gcaatgaaaaaaactgcaaaacattggttt

SEQ ID NO: 456 - DNA, 30 bp, Artificial Sequence
  Synthetic Construct
gtttttttttttttttcctttttttttctt

SEQ ID NO: 457 - DNA, 30 bp, Artificial Sequence
  Synthetic Construct
ttttttttttttcctttttttttctttctt

SEQ ID NO: 458 - DNA, 30 bp, Artificial Sequence
  Synthetic Construct
tttttttttttcctttttttttctttcttt

SEQ ID NO: 459 - DNA, 30 bp, Artificial Sequence
  Synthetic Construct
ttttttttttcctttttttttctttctttc

SEQ ID NO: 460 - DNA, 30 bp, Artificial Sequence
  Synthetic Construct
tttttttttcctttttttttctttctttct

SEQ ID NO: 461 - DNA, 30 bp, Artificial Sequence
  Synthetic Construct
ttttttttcctttttttttctttctttctt

SEQ ID NO: 462 - DNA, 30 bp, Artificial Sequence
  Synthetic Construct
tttttttcctttttttttctttctttcttt

SEQ ID NO: 463 - DNA, 30 bp, Artificial Sequence
  Synthetic Construct
ttttttcctttttttttctttctttctttt

SEQ ID NO: 464 - DNA, 30 bp, Artificial Sequence
  Synthetic Construct
tttttcctttttttttctttctttctttta

SEQ ID NO: 465 - DNA, 30 bp, Artificial Sequence
  Synthetic Construct
ttttcctttttttttctttctttcttttac

SEQ ID NO: 466 - DNA, 30 bp, Artificial Sequence
  Synthetic Construct
tttcctttttttttctttctttcttttact

SEQ ID NO: 467 - DNA, 30 bp, Artificial Sequence
  Synthetic Construct
ttcctttttttttctttctttcttttactg

SEQ ID NO: 468 - DNA, 30 bp, Artificial Sequence
  Synthetic Construct
tcctttttttttctttctttcttttactgc

SEQ ID NO: 469 - DNA, 30 bp, Artificial Sequence
  Synthetic Construct
ttttactgcatatgaaggtaagatgctgga

SEQ ID NO: 470 - DNA, 30 bp, Artificial Sequence
  Synthetic Construct
cttttactgcatatgaaggtaagatgctgg

SEQ ID NO: 471 - DNA, 30 bp, Artificial Sequence
  Synthetic Construct
tttcttttactgcatatgaaggtaagatgc

SEQ ID NO: 472 - DNA, 30 bp, Artificial Sequence
  Synthetic Construct
ctttcttttactgcatatgaaggtaagatg

SEQ ID NO: 473 - DNA, 30 bp, Artificial Sequence
  Synthetic Construct
tttctttcttttactgcatatgaaggtaag

SEQ ID NO: 474 - DNA, 30 bp, Artificial Sequence
  Synthetic Construct
ctttctttcttttactgcatatgaaggtaa

SEQ ID NO: 475 - DNA, 30 bp, Artificial Sequence
  Synthetic Construct
actgcatatgaaggtaagatgctggaatgt

SEQ ID NO: 476 - DNA, 30 bp, Artificial Sequence
  Synthetic Construct
tctttctttcttttactgcatatgaaggta

SEQ ID NO: 477 - DNA, 30 bp, Artificial Sequence
  Synthetic Construct
tttctttctttcttttactgcatatgaagg

SEQ ID NO: 478 - DNA, 30 bp, Artificial Sequence
  Synthetic Construct
ttttctttctttcttttactgcatatgaag

SEQ ID NO: 479 - DNA, 30 bp, Artificial Sequence
  Synthetic Construct
tttttctttctttcttttactgcatatgaa

SEQ ID NO: 480 - DNA, 30 bp, Artificial Sequence
  Synthetic Construct
ttttttctttctttcttttactgcatatga

SEQ ID NO: 481 - DNA, 30 bp, Artificial Sequence
  Synthetic Construct
ctttttttttctttctttcttttactgcat

SEQ ID NO: 482 - DNA, 30 bp, Artificial Sequence
  Synthetic Construct
cctttttttttctttctttcttttactgca

SEQ ID NO: 483 - DNA, 30 bp, Artificial Sequence
  Synthetic Construct
ttctttctttcttttactgcatatgaaggt

SEQ ID NO: 484 - DNA, 30 bp, Artificial Sequence
  Synthetic Construct
tatcaatattagcttatatacctgttctag

SEQ ID NO: 485 - DNA, 30 bp, Artificial Sequence
  Synthetic Construct
aaggccttttttcttcctttccaattgata

SEQ ID NO: 486 - DNA, 30 bp, Artificial Sequence
  Synthetic Construct
tatacctgttctagttttaaatggcaaata

SEQ ID NO: 487 - DNA, 30 bp, Artificial Sequence
  Synthetic Construct
atgtgtttctccagggtactgtacacgcta

SEQ ID NO: 488 - DNA, 30 bp, Artificial Sequence
  Synthetic Construct
ctccagggtactgtacacgctaaaaggcat

SEQ ID NO: 489 - DNA, 30 bp, Artificial Sequence
  Synthetic Construct
tccagggtactgtacacgctaaaaggcatc

SEQ ID NO: 490 - DNA, 30 bp, Artificial Sequence
  Synthetic Construct
caaatttcacatttgtaaacgtccttcccc

SEQ ID NO: 491 - DNA, 30 bp, Artificial Sequence
  Synthetic Construct
cacatttgtaaacgtccttccccacctggc

SEQ ID NO: 492 - DNA, 30 bp, Artificial Sequence
  Synthetic Construct
acatttgtaaacgtccttccccacctggcc

SEQ ID NO: 493 - DNA, 30 bp, Artificial Sequence
  Synthetic Construct
gtaaacgtccttccccacctggccatgcgt

SEQ ID NO: 494 - DNA, 30 bp, Artificial Sequence
  Synthetic Construct
taaacgtccttccccacctggccatgcgtt

SEQ ID NO: 495 - DNA, 30 bp, Artificial Sequence
  Synthetic Construct
cccacctggccatgcgttttcatgtgcctg

SEQ ID NO: 496 - DNA, 30 bp, Artificial Sequence
  Synthetic Construct
tcatgtgcctggtgagcttgctactctggg

SEQ ID NO: 497 - DNA, 30 bp, Artificial Sequence
  Synthetic Construct
catgtgcctggtgagcttgctactctgggc

SEQ ID NO: 498 - DNA, 30 bp, Artificial Sequence
  Synthetic Construct
atgtgcctggtgagcttgctactctgggca

SEQ ID NO: 499 - DNA, 30 bp, Artificial Sequence
  Synthetic Construct
ctactctgggcacaggcatagttgcacagc

SEQ ID NO: 500 - DNA, 30 bp, Artificial Sequence
  Synthetic Construct
cacagctcgcatttataaggcctttcgccc

SEQ ID NO: 501 - DNA, 30 bp, Artificial Sequence
  Synthetic Construct
catgtgtttctccagggtactgtacacgct

SEQ ID NO: 502 - DNA, 30 bp, Artificial Sequence
  Synthetic Construct
ataaggcctttcgcccgtgtggcttctcct

SEQ ID NO: 503 - DNA, 30 bp, Artificial Sequence
  Synthetic Construct
cgcccgtgtggcttctcctgtggacagtga

SEQ ID NO: 504 - DNA, 30 bp, Artificial Sequence
  Synthetic Construct
gcccgtgtggcttctcctgtggacagtgag

SEQ ID NO: 505 - DNA, 30 bp, Artificial Sequence
  Synthetic Construct
tcctgtggacagtgagattgctacagttct

SEQ ID NO: 506 - DNA, 30 bp, Artificial Sequence
  Synthetic Construct
ctacagttcttgaagactttcccacagtac

SEQ ID NO: 507 - DNA, 30 bp, Artificial Sequence
  Synthetic Construct
ttgaagactttcccacagtactcacaagtg

SEQ ID NO: 508 - DNA, 30 bp, Artificial Sequence
  Synthetic Construct
aagactttcccacagtactcacaagtgtcg

SEQ ID NO: 509 - DNA, 30 bp, Artificial Sequence
  Synthetic Construct
cccacagtactcacaagtgtcgctgcgtct

SEQ ID NO: 510 - DNA, 30 bp, Artificial Sequence
  Synthetic Construct
ccacagtactcacaagtgtcgctgcgtctg

SEQ ID NO: 511 - DNA, 30 bp, Artificial Sequence
  Synthetic Construct
tgagctgggcctgcccgggcccggaccact

SEQ ID NO: 512 - DNA, 30 bp, Artificial Sequence
  Synthetic Construct
gagctgggcctgcccgggcccggaccacta

SEQ ID NO: 513 - DNA, 30 bp, Artificial Sequence
  Synthetic Construct
agctgggcctgcccgggcccggaccactaa

SEQ ID NO: 514 - DNA, 30 bp, Artificial Sequence
  Synthetic Construct
ccgtgccgctgcgccccgagatccctccgt

SEQ ID NO: 515 - DNA, 30 bp, Artificial Sequence
  Synthetic Construct
tccgaggagtgctccgacgaggaggcaaaa

SEQ ID NO: 516 - DNA, 30 bp, Artificial Sequence
  Synthetic Construct
tctggagtctccgaagctaaggaagggatc

SEQ ID NO: 517 - DNA, 30 bp, Artificial Sequence
  Synthetic Construct
taaggcctttcgcccgtgtggcttctcctg

SEQ ID NO: 518 - DNA, 30 bp, Artificial Sequence
  Synthetic Construct
tcatgtgtttctccagggtactgtacacgc

SEQ ID NO: 519 - DNA, 30 bp, Artificial Sequence
  Synthetic Construct
ttcatgtgtttctccagggtactgtacacg

SEQ ID NO: 520 - DNA, 30 bp, Artificial Sequence
  Synthetic Construct
tttcatgtgtttctccagggtactgtacac

SEQ ID NO: 521 - DNA, 30 bp, Artificial Sequence
  Synthetic Construct
aaaaaaaaacatacacaacatgtaaattat

SEQ ID NO: 522 - DNA, 30 bp, Artificial Sequence
  Synthetic Construct
aaaaaaaacatacacaacatgtaaattatt

SEQ ID NO: 523 - DNA, 30 bp, Artificial Sequence
  Synthetic Construct
ttgcacaagagaaaggctcaaagtttgcgt

SEQ ID NO: 524 - DNA, 30 bp, Artificial Sequence
  Synthetic Construct
cacaagagaaaggctcaaagtttgcgtaaa

SEQ ID NO: 525 - DNA, 30 bp, Artificial Sequence
  Synthetic Construct
gcgtaaaatgcaatagtattgccccataca

SEQ ID NO: 526 - DNA, 30 bp, Artificial Sequence
  Synthetic Construct
cgtaaaatgcaatagtattgccccatacag

SEQ ID NO: 527 - DNA, 30 bp, Artificial Sequence
  Synthetic Construct
ccccatacagatcatgcattcaaacggtga

SEQ ID NO: 528 - DNA, 30 bp, Artificial Sequence
  Synthetic Construct
aaacggtgagaacataaaggaaaaaaaaaa

SEQ ID NO: 529 - DNA, 30 bp, Artificial Sequence
  Synthetic Construct
ttagcttcgttacttctgtttgtttgtttg

SEQ ID NO: 530 - DNA, 30 bp, Artificial Sequence
  Synthetic Construct
gcttcgttacttctgtttgtttgtttgttt

SEQ ID NO: 531 - DNA, 30 bp, Artificial Sequence
  Synthetic Construct
gttacttctgtttgtttgtttgtttgttta

SEQ ID NO: 532 - DNA, 30 bp, Artificial Sequence
  Synthetic Construct
cttctgtttgtttgtttgtttgtttaaatc

SEQ ID NO: 533 - DNA, 30 bp, Artificial Sequence
  Synthetic Construct
tgtttgtttgtttgtttgtttaaatcacat

SEQ ID NO: 534 - DNA, 30 bp, Artificial Sequence
  Synthetic Construct
gtttgtttgtttgtttaaatcacatgggac

SEQ ID NO: 535 - DNA, 30 bp, Artificial Sequence
  Synthetic Construct
tttgtttgtttgtttaaatcacatgggact

SEQ ID NO: 536 - DNA, 30 bp, Artificial Sequence
  Synthetic Construct
gtttgtttgtttaaatcacatgggactaga

SEQ ID NO: 537 - DNA, 30 bp, Artificial Sequence
  Synthetic Construct
tttgtttgtttaaatcacatgggactagaa

SEQ ID NO: 538 - DNA, 30 bp, Artificial Sequence
  Synthetic Construct
aacactcgatcactgtgccattttttcatg

SEQ ID NO: 539 - DNA, 30 bp, Artificial Sequence
  Synthetic Construct
ttcaacactcgatcactgtgccattttttc

SEQ ID NO: 540 - DNA, 30 bp, Artificial Sequence
  Synthetic Construct
tatcattattcaacactcgatcactgtgcc

SEQ ID NO: 541 - DNA, 30 bp, Artificial Sequence
  Synthetic Construct
atatcattattcaacactcgatcactgtgc

SEQ ID NO: 542 - DNA, 30 bp, Artificial Sequence
  Synthetic Construct
tatatcattattcaacactcgatcactgtg

SEQ ID NO: 543 - DNA, 30 bp, Artificial Sequence
  Synthetic Construct
ttatatcattattcaacactcgatcactgt

SEQ ID NO: 544 - DNA, 30 bp, Artificial Sequence
  Synthetic Construct
gagctgcctggaggccgcgtagccggcgag

SEQ ID NO: 545 - DNA, 30 bp, Artificial Sequence
  Synthetic Construct
agtttttatatcattattcaacactcgatc

SEQ ID NO: 546 - DNA, 30 bp, Artificial Sequence
  Synthetic Construct
aatcacatgggactagaaaaaaatcctaca

SEQ ID NO: 547 - DNA, 30 bp, Artificial Sequence
  Synthetic Construct
aaatcacatgggactagaaaaaaatcctac

SEQ ID NO: 548 - DNA, 30 bp, Artificial Sequence
  Synthetic Construct
tttaaatcacatgggactagaaaaaaatcc

SEQ ID NO: 549 - DNA, 30 bp, Artificial Sequence
  Synthetic Construct
gtttaaatcacatgggactagaaaaaaatc

SEQ ID NO: 550 - DNA, 30 bp, Artificial Sequence
  Synthetic Construct
tttgtttaaatcacatgggactagaaaaaa

SEQ ID NO: 551 - DNA, 30 bp, Artificial Sequence
  Synthetic Construct
gtttgtttaaatcacatgggactagaaaaa

SEQ ID NO: 552 - DNA, 30 bp, Artificial Sequence
  Synthetic Construct
atatacctctattcagtttttatatcatta

SEQ ID NO: 553 - DNA, 30 bp, Artificial Sequence
  Synthetic Construct
agctgcctggaggccgcgtagccggcgagc

SEQ ID NO: 554 - DNA, 30 bp, Artificial Sequence
  Synthetic Construct
tccgtgttgggcatcgcggccgggggcagg

SEQ ID NO: 555 - DNA, 30 bp, Artificial Sequence
  Synthetic Construct
ggcatcgcggccgggggcaggtcgaactcc

SEQ ID NO: 556 - DNA, 30 bp, Artificial Sequence
  Synthetic Construct
aacgtcttgccgcagaactcgcatgacttg

SEQ ID NO: 557 - DNA, 30 bp, Artificial Sequence
  Synthetic Construct
ccgcagaactcgcatgacttggacttgacc

SEQ ID NO: 558 - DNA, 30 bp, Artificial Sequence
  Synthetic Construct
gacttgaccgggggctgggagggaggaggg

SEQ ID NO: 559 - DNA, 30 bp, Artificial Sequence
  Synthetic Construct
accgggggctgggagggaggaggggcggat

SEQ ID NO: 560 - DNA, 30 bp, Artificial Sequence
  Synthetic Construct
cagaggagggagggggggcgtcgccaggaa

SEQ ID NO: 561 - DNA, 30 bp, Artificial Sequence
  Synthetic Construct
ctacctggctggaatggttgcagtaacctt

SEQ ID NO: 562 - DNA, 30 bp, Artificial Sequence
  Synthetic Construct
cagtaacctttgcatagggctgggccggcc

SEQ ID NO: 563 - DNA, 30 bp, Artificial Sequence
  Synthetic Construct
gcatagggctgggccggcctggggacagcg

SEQ ID NO: 564 - DNA, 30 bp, Artificial Sequence
  Synthetic Construct
catagggctgggccggcctggggacagcgg

SEQ ID NO: 565 - DNA, 30 bp, Artificial Sequence
  Synthetic Construct
cctgccagctctctaagtctcctagagaaa

SEQ ID NO: 566 - DNA, 30 bp, Artificial Sequence
  Synthetic Construct
gattcaaccgcagcaccctgtcaaaggcac

SEQ ID NO: 567 - DNA, 30 bp, Artificial Sequence
  Synthetic Construct
aaccgcagcaccctgtcaaaggcactcggg

SEQ ID NO: 568 - DNA, 30 bp, Artificial Sequence
  Synthetic Construct
cgcccccaggcgctctatgcggtgggggtc

SEQ ID NO: 569 - DNA, 30 bp, Artificial Sequence
  Synthetic Construct
tgccaggccggaagcctctctcgatactga

SEQ ID NO: 570 - DNA, 30 bp, Artificial Sequence
  Synthetic Construct
ttagcaggttaaaggggttattgtctgcaa

SEQ ID NO: 571 - DNA, 30 bp, Artificial Sequence
  Synthetic Construct
gcaggttaaaggggttattgtctgcaatat

SEQ ID NO: 572 - DNA, 30 bp, Artificial Sequence
  Synthetic Construct
aaggggttattgtctgcaatatgaatccca

SEQ ID NO: 573 - DNA, 30 bp, Artificial Sequence
  Synthetic Construct
tacatgtgtagctgctgggctcatctttac

SEQ ID NO: 574 - DNA, 30 bp, Artificial Sequence
  Synthetic Construct
caagttgtacatgtgtagctgctgggctca

SEQ ID NO: 575 - DNA, 30 bp, Artificial Sequence
  Synthetic Construct
gcaagttgtacatgtgtagctgctgggctc

SEQ ID NO: 576 - DNA, 30 bp, Artificial Sequence
  Synthetic Construct
caagagaaaccatgcactggtgaatggctg

SEQ ID NO: 577 - DNA, 30 bp, Artificial Sequence
  Synthetic Construct
tgtgcgtgttgcaagagaaaccatgcactg

SEQ ID NO: 578 - DNA, 30 bp, Artificial Sequence
  Synthetic Construct
atccatgagtgttctgtgcgtgttgcaaga

SEQ ID NO: 579 - DNA, 30 bp, Artificial Sequence
  Synthetic Construct
gaacgtcttgccgcagaactcgcatgactt

SEQ ID NO: 580 - DNA, 30 bp, Artificial Sequence
  Synthetic Construct
ttaatccatgagtgttctgtgcgtgttgca

SEQ ID NO: 581 - DNA, 30 bp, Artificial Sequence
  Synthetic Construct
ctaagtagattcttaatccatgagtgttct

SEQ ID NO: 582 - DNA, 30 bp, Artificial Sequence
  Synthetic Construct
gctttctaagtagattcttaatccatgagt

SEQ ID NO: 583 - DNA, 30 bp, Artificial Sequence
  Synthetic Construct
cgtgttcgctttctaagtagattcttaatc

SEQ ID NO: 584 - DNA, 30 bp, Artificial Sequence
  Synthetic Construct
tgcacctagtcctgaagggataccaacccg

SEQ ID NO: 585 - DNA, 30 bp, Artificial Sequence
  Synthetic Construct
tctgcaatatgaatcccatggagaggtggc

SEQ ID NO: 586 - DNA, 30 bp, Artificial Sequence
  Synthetic Construct
ttgtctgcaatatgaatcccatggagaggt

SEQ ID NO: 587 - DNA, 30 bp, Artificial Sequence
  Synthetic Construct
taagtagattcttaatccatgagtgttctg

SEQ ID NO: 588 - DNA, 30 bp, Artificial Sequence
  Synthetic Construct
aaatagccataacataccatacatgctgtc

SEQ ID NO: 589 - DNA, 30 bp, Artificial Sequence
  Synthetic Construct
ctctgaaatttgaacgtcttgccgcagaac

SEQ ID NO: 590 - DNA, 30 bp, Artificial Sequence
  Synthetic Construct
tagggcttctcgcccgtgtggctgcgccgg

SEQ ID NO: 591 - DNA, 30 bp, Artificial Sequence
  Synthetic Construct
tcgagcttgatgcgcttagagaaggggctc

SEQ ID NO: 592 - DNA, 30 bp, Artificial Sequence
  Synthetic Construct
atgcgcttagagaaggggctcagcgagctg

SEQ ID NO: 593 - DNA, 30 bp, Artificial Sequence
  Synthetic Construct
gagaaggggctcagcgagctggggctgccc

SEQ ID NO: 594 - DNA, 30 bp, Artificial Sequence
  Synthetic Construct
ttggacaggccccccgaggccgactcgccc

SEQ ID NO: 595 - DNA, 30 bp, Artificial Sequence
  Synthetic Construct
tggacaggccccccgaggccgactcgcccg

SEQ ID NO: 596 - DNA, 30 bp, Artificial Sequence
  Synthetic Construct
ggacaggccccccgaggccgactcgcccgg

SEQ ID NO: 597 - DNA, 30 bp, Artificial Sequence
  Synthetic Construct
gacaggccccccgaggccgactcgcccggg

SEQ ID NO: 598 - DNA, 30 bp, Artificial Sequence
  Synthetic Construct
acagtgccatcgtctatgcggtccgactcg

SEQ ID NO: 599 - DNA, 30 bp, Artificial Sequence
  Synthetic Construct
gtcgcaagtgtccctgtggccctcggcctc

SEQ ID NO: 600 - DNA, 30 bp, Artificial Sequence
  Synthetic Construct
tgcttctcgcccaggacctggtggaaggcc

SEQ ID NO: 601 - DNA, 30 bp, Artificial Sequence
  Synthetic Construct
tcgcccaggacctggtggaaggcctcgctg

SEQ ID NO: 602 - DNA, 30 bp, Artificial Sequence
  Synthetic Construct
tcgtggtggcgcgccgcctccaggctcagc

SEQ ID NO: 603 - DNA, 30 bp, Artificial Sequence
  Synthetic Construct
ctcctcttcttcctcttcctcgtcgtcctc

SEQ ID NO: 604 - DNA, 30 bp, Artificial Sequence
  Synthetic Construct
ttcctcttcctcgtcgtcctcctcttcctc

SEQ ID NO: 605 - DNA, 30 bp, Artificial Sequence
  Synthetic Construct
ctcttcctcgtcgtcctcctcttcctcctc

SEQ ID NO: 606 - DNA, 30 bp, Artificial Sequence
  Synthetic Construct
ctcgtcgtcctcctcttcctcctcgtcccc

SEQ ID NO: 607 - DNA, 30 bp, Artificial Sequence
  Synthetic Construct
ctcctcgtccccgttctccgggatcaggtt

SEQ ID NO: 608 - DNA, 30 bp, Artificial Sequence
  Synthetic Construct
cacttgtagggcttctcgcccgtgtggctg

SEQ ID NO: 609 - DNA, 30 bp, Artificial Sequence
  Synthetic Construct
ctggcctgggtgcacgcgtggtcgcacagg

SEQ ID NO: 610 - DNA, 30 bp, Artificial Sequence
  Synthetic Construct
agcttgctggcctgggtgcacgcgtggtcg

SEQ ID NO: 611 - DNA, 30 bp, Artificial Sequence
  Synthetic Construct
atgtggcgcttcagcttgctggcctgggtg

SEQ ID NO: 612 - DNA, 30 bp, Artificial Sequence
  Synthetic Construct
tgcatgtgcgtcttcatgtggcgcttcagc

SEQ ID NO: 613 - DNA, 30 bp, Artificial Sequence
  Synthetic Construct
gtgcatgtgcgtcttcatgtggcgcttcag

SEQ ID NO: 614 - DNA, 30 bp, Artificial Sequence
  Synthetic Construct
tcgcccgtgtggctgcgccggtgcaccacc

SEQ ID NO: 615 - DNA, 30 bp, Artificial Sequence
  Synthetic Construct
accgtcatgggggacgatttgtgcatgtgc

SEQ ID NO: 616 - DNA, 30 bp, Artificial Sequence
  Synthetic Construct
agcgcgctgctggcgctgcccaccaagtcg

SEQ ID NO: 617 - DNA, 30 bp, Artificial Sequence
  Synthetic Construct
gccaccacggacttgagcgcgctgctggcg

SEQ ID NO: 618 - DNA, 30 bp, Artificial Sequence
  Synthetic Construct
aacttggccaccacggacttgagcgcgctg

SEQ ID NO: 619 - DNA, 30 bp, Artificial Sequence
  Synthetic Construct
tcgctcttgaacttggccaccacggacttg

SEQ ID NO: 620 - DNA, 30 bp, Artificial Sequence
  Synthetic Construct
gggtcgttctcgctcttgaacttggccacc

SEQ ID NO: 621 - DNA, 30 bp, Artificial Sequence
  Synthetic Construct
tccgggatcaggttggggtcgttctcgctc

SEQ ID NO: 622 - DNA, 30 bp, Artificial Sequence
  Synthetic Construct
cggggagctggcggtggagagaccgtcgtc

SEQ ID NO: 623 - DNA, 30 bp, Artificial Sequence
  Synthetic Construct
aaaatagccataacataccatacatgctgt

SEQ ID NO: 624 - DNA, 30 bp, Artificial Sequence
  Synthetic Construct
gggacaatttaaaatagccataacatacca

SEQ ID NO: 625 - DNA, 30 bp, Artificial Sequence
  Synthetic Construct
ctcagcaacgaattagggacaatttaaaat

SEQ ID NO: 626 - DNA, 30 bp, Artificial Sequence
  Synthetic Construct
ctagtgtatttaattgcgttccagggcttt

SEQ ID NO: 627 - DNA, 30 bp, Artificial Sequence
  Synthetic Construct
aattgcgttccagggcttttgcacattaca

SEQ ID NO: 628 - DNA, 30 bp, Artificial Sequence
  Synthetic Construct
attgcgttccagggcttttgcacattacac

SEQ ID NO: 629 - DNA, 30 bp, Artificial Sequence
  Synthetic Construct
cgttccagggcttttgcacattacacattc

SEQ ID NO: 630 - DNA, 30 bp, Artificial Sequence
  Synthetic Construct
cagggcttttgcacattacacattcaattt

SEQ ID NO: 631 - DNA, 30 bp, Artificial Sequence
  Synthetic Construct
tgcacattacacattcaatttaatcattgt

SEQ ID NO: 632 - DNA, 30 bp, Artificial Sequence
  Synthetic Construct
gcacattacacattcaatttaatcattgtt

SEQ ID NO: 633 - DNA, 30 bp, Artificial Sequence
  Synthetic Construct
cacattacacattcaatttaatcattgttt

SEQ ID NO: 634 - DNA, 30 bp, Artificial Sequence
  Synthetic Construct
cacattcaatttaatcattgtttaaaaaaa

SEQ ID NO: 635 - DNA, 30 bp, Artificial Sequence
  Synthetic Construct
aatttaatcattgtttaaaaaaaataaaac

SEQ ID NO: 636 - DNA, 30 bp, Artificial Sequence
  Synthetic Construct
aatcattgtttaaaaaaaataaaactttgg

SEQ ID NO: 637 - DNA, 30 bp, Artificial Sequence
  Synthetic Construct
atcattgtttaaaaaaaataaaactttggg

SEQ ID NO: 638 - DNA, 30 bp, Artificial Sequence
  Synthetic Construct
tttaaaaaaaataaaactttgggcaaaaca

SEQ ID NO: 639 - DNA, 30 bp, Artificial Sequence
  Synthetic Construct
aaaaaaaataaaactttgggcaaaacagcc

SEQ ID NO: 640 - DNA, 30 bp, Artificial Sequence
  Synthetic Construct
aaaaaaataaaactttgggcaaaacagccc

SEQ ID NO: 641 - DNA, 30 bp, Artificial Sequence
  Synthetic Construct
gggcaaaacagcccatttcttttaagctct

SEQ ID NO: 642 - DNA, 30 bp, Artificial Sequence
  Synthetic Construct
ggcaaaacagcccatttcttttaagctctc

SEQ ID NO: 643 - DNA, 30 bp, Artificial Sequence
  Synthetic Construct
aactaaaggaaaaatgatgattaactagga

SEQ ID NO: 644 - DNA, 30 bp, Artificial Sequence
  Synthetic Construct
taaaattaaactaaaggaaaaatgatgatt

SEQ ID NO: 645 - DNA, 30 bp, Artificial Sequence
  Synthetic Construct
ataaaattaaactaaaggaaaaatgatgat

SEQ ID NO: 646 - DNA, 30 bp, Artificial Sequence
  Synthetic Construct
tttataaaattaaactaaaggaaaaatgat

SEQ ID NO: 647 - DNA, 30 bp, Artificial Sequence
  Synthetic Construct
gtttataaaattaaactaaaggaaaaatga

SEQ ID NO: 648 - DNA, 30 bp, Artificial Sequence
  Synthetic Construct
tgtttataaaattaaactaaaggaaaaatg

SEQ ID NO: 649 - DNA, 30 bp, Artificial Sequence
  Synthetic Construct
ataaaatgaactccttactagtgtatttaa

SEQ ID NO: 650 - DNA, 30 bp, Artificial Sequence
  Synthetic Construct
tactggtataatcagttttgtttataaaat

SEQ ID NO: 651 - DNA, 30 bp, Artificial Sequence
  Synthetic Construct
tatactggtataatcagttttgtttataaa

SEQ ID NO: 652 - DNA, 30 bp, Artificial Sequence
  Synthetic Construct
agctctcaccaggagcaaagtagcttttat

SEQ ID NO: 653 - DNA, 30 bp, Artificial Sequence
  Synthetic Construct
aagctctcaccaggagcaaagtagctttta

SEQ ID NO: 654 - DNA, 30 bp, Artificial Sequence
  Synthetic Construct
taagctctcaccaggagcaaagtagctttt

SEQ ID NO: 655 - DNA, 30 bp, Artificial Sequence
  Synthetic Construct
ttttaagctctcaccaggagcaaagtagct

SEQ ID NO: 656 - DNA, 30 bp, Artificial Sequence
  Synthetic Construct
cttttaagctctcaccaggagcaaagtagc

SEQ ID NO: 657 - DNA, 30 bp, Artificial Sequence
  Synthetic Construct
atactggtataatcagttttgtttataaaa

SEQ ID NO: 658 - DNA, 30 bp, Artificial Sequence
  Synthetic Construct
actaggacataatgggtcatctttttaggt

SEQ ID NO: 659 - DNA, 30 bp, Artificial Sequence
  Synthetic Construct
aagcaaatatcttcataaaatgaactcctt

SEQ ID NO: 660 - DNA, 30 bp, Artificial Sequence
  Synthetic Construct
aaaagacattattaaagcaaatatcttcat

SEQ ID NO: 661 - DNA, 30 bp, Artificial Sequence
  Synthetic Construct
tagttttaaatggcaaatagtaccacgttg

SEQ ID NO: 662 - DNA, 30 bp, Artificial Sequence
  Synthetic Construct
taaatggcaaatagtaccacgttgtgctaa

SEQ ID NO: 663 - DNA, 30 bp, Artificial Sequence
  Synthetic Construct
aaatggcaaatagtaccacgttgtgctaat

SEQ ID NO: 664 - DNA, 30 bp, Artificial Sequence
  Synthetic Construct
aatggcaaatagtaccacgttgtgctaata

SEQ ID NO: 665 - DNA, 30 bp, Artificial Sequence
  Synthetic Construct
tgctaataaatcatattattttcttctgtt

SEQ ID NO: 666 - DNA, 30 bp, Artificial Sequence
  Synthetic Construct
ttttcttctgttcccctctgtcaaacctta

SEQ ID NO: 667 - DNA, 30 bp, Artificial Sequence
  Synthetic Construct
tcttctgttcccctctgtcaaaccttattg

SEQ ID NO: 668 - DNA, 30 bp, Artificial Sequence
  Synthetic Construct
cttctgttcccctctgtcaaaccttattgt

SEQ ID NO: 669 - DNA, 30 bp, Artificial Sequence
  Synthetic Construct
ttctgttcccctctgtcaaaccttattgtc

SEQ ID NO: 670 - DNA, 30 bp, Artificial Sequence
  Synthetic Construct
tgttcccctctgtcaaaccttattgtcagc

SEQ ID NO: 671 - DNA, 30 bp, Artificial Sequence
  Synthetic Construct
ccctctgtcaaaccttattgtcagcctctt

SEQ ID NO: 672 - DNA, 30 bp, Artificial Sequence
  Synthetic Construct
ttgtcagcctcttcctttcaatatggtata

SEQ ID NO: 673 - DNA, 30 bp, Artificial Sequence
  Synthetic Construct
tcagcctcttcctttcaatatggtatacaa

SEQ ID NO: 674 - DNA, 30 bp, Artificial Sequence
  Synthetic Construct
ctttcaatatggtatacaaggtcttaaagt

SEQ ID NO: 675 - DNA, 30 bp, Artificial Sequence
  Synthetic Construct
caatatggtatacaaggtcttaaagtttat

SEQ ID NO: 676 - DNA, 30 bp, Artificial Sequence
  Synthetic Construct
aatatggtatacaaggtcttaaagtttatc

SEQ ID NO: 677 - DNA, 30 bp, Artificial Sequence
  Synthetic Construct
aagtttatcatttgattgtccacttgacaa

SEQ ID NO: 678 - DNA, 30 bp, Artificial Sequence
  Synthetic Construct
aaaaagacattattaaagcaaatatcttca

SEQ ID NO: 679 - DNA, 30 bp, Artificial Sequence
  Synthetic Construct
taaaaagacattattaaagcaaatatcttc

SEQ ID NO: 680 - DNA, 30 bp, Artificial Sequence
  Synthetic Construct
ttaaaaagacattattaaagcaaatatctt

SEQ ID NO: 681 - DNA, 30 bp, Artificial Sequence
  Synthetic Construct
gtgccagtatttttaaaaagacattattaa

SEQ ID NO: 682 - DNA, 30 bp, Artificial Sequence
  Synthetic Construct
ggtgccagtatttttaaaaagacattatta

SEQ ID NO: 683 - DNA, 30 bp, Artificial Sequence
  Synthetic Construct
tggtgccagtatttttaaaaagacattatt

SEQ ID NO: 684 - DNA, 30 bp, Artificial Sequence
  Synthetic Construct
ttaaagcaaatatcttcataaaatgaactc

SEQ ID NO: 685 - DNA, 30 bp, Artificial Sequence
  Synthetic Construct
ttttggtgccagtatttttaaaaagacatt

SEQ ID NO: 686 - DNA, 30 bp, Artificial Sequence
  Synthetic Construct
acaaccaagtagatctggatctatttcttt

SEQ ID NO: 687 - DNA, 30 bp, Artificial Sequence
  Synthetic Construct
tccacttgacaaccaagtagatctggatct

SEQ ID NO: 688 - DNA, 30 bp, Artificial Sequence
  Synthetic Construct
attgtccacttgacaaccaagtagatctgg

SEQ ID NO: 689 - DNA, 30 bp, Artificial Sequence
  Synthetic Construct
gattgtccacttgacaaccaagtagatctg

SEQ ID NO: 690 - DNA, 30 bp, Artificial Sequence
  Synthetic Construct
tcatttgattgtccacttgacaaccaagta

SEQ ID NO: 691 - DNA, 30 bp, Artificial Sequence
  Synthetic Construct
atcatttgattgtccacttgacaaccaagt

SEQ ID NO: 692 - DNA, 30 bp, Artificial Sequence
  Synthetic Construct
cttttggtgccagtatttttaaaaagacat

SEQ ID NO: 693 - DNA, 30 bp, Artificial Sequence
  Synthetic Construct
gcttatatacctgttctagttttaaatggc

SEQ ID NO: 694 - DNA, 30 bp, Artificial Sequence
  Synthetic Construct
ttaggtagccattgttgtgagaaatacaat

SEQ ID NO: 695 - DNA, 30 bp, Artificial Sequence
  Synthetic Construct
aggtagccattgttgtgagaaatacaatat

SEQ ID NO: 696 - DNA, 30 bp, Artificial Sequence
  Synthetic Construct
atacatttaaccctttagagacagacattt

SEQ ID NO: 697 - DNA, 30 bp, Artificial Sequence
  Synthetic Construct
aaccctttagagacagacatttagctcata

SEQ ID NO: 698 - DNA, 30 bp, Artificial Sequence
  Synthetic Construct
accctttagagacagacatttagctcatag

SEQ ID NO: 699 - DNA, 30 bp, Artificial Sequence
  Synthetic Construct
agagacagacatttagctcatagagatttt

SEQ ID NO: 700 - DNA, 30 bp, Artificial Sequence
  Synthetic Construct
gagacagacatttagctcatagagattttt

SEQ ID NO: 701 - DNA, 30 bp, Artificial Sequence
  Synthetic Construct
agctcatagagattttttttcagtgctatc

SEQ ID NO: 702 - DNA, 30 bp, Artificial Sequence
  Synthetic Construct
gctcatagagattttttttcagtgctatct

SEQ ID NO: 703 - DNA, 30 bp, Artificial Sequence
  Synthetic Construct
tttttcagtgctatctattctgtctataga

SEQ ID NO: 704 - DNA, 30 bp, Artificial Sequence
  Synthetic Construct
ttttcagtgctatctattctgtctatagag

SEQ ID NO: 705 - DNA, 30 bp, Artificial Sequence
  Synthetic Construct
tttcagtgctatctattctgtctatagagg

SEQ ID NO: 706 - DNA, 30 bp, Artificial Sequence
  Synthetic Construct
ttcagtgctatctattctgtctatagaggg

SEQ ID NO: 707 - DNA, 30 bp, Artificial Sequence
  Synthetic Construct
tcagtgctatctattctgtctatagagggt

SEQ ID NO: 708 - DNA, 30 bp, Artificial Sequence
  Synthetic Construct
cagtgctatctattctgtctatagagggtt

SEQ ID NO: 709 - DNA, 30 bp, Artificial Sequence
  Synthetic Construct
agtgctatctattctgtctatagagggtta

SEQ ID NO: 710 - DNA, 30 bp, Artificial Sequence
  Synthetic Construct
tgtctatagagggttaatccaaagactgtt

SEQ ID NO: 711 - DNA, 30 bp, Artificial Sequence
  Synthetic Construct
atccaaagactgtttttcctcctcacgtta

SEQ ID NO: 712 - DNA, 30 bp, Artificial Sequence
  Synthetic Construct
ttcctcctcacgttataaaataaaactgta

SEQ ID NO: 713 - DNA, 30 bp, Artificial Sequence
  Synthetic Construct
gctcagcaacgaattagggacaatttaaaa

SEQ ID NO: 714 - DNA, 30 bp, Artificial Sequence
  Synthetic Construct
tctcagaacggaactggaaacagcaacatg

SEQ ID NO: 715 - DNA, 30 bp, Artificial Sequence
  Synthetic Construct
ctctcagaacggaactggaaacagcaacat

SEQ ID NO: 716 - DNA, 30 bp, Artificial Sequence
  Synthetic Construct
tctctcagaacggaactggaaacagcaaca

SEQ ID NO: 717 - DNA, 30 bp, Artificial Sequence
  Synthetic Construct
ttctctcagaacggaactggaaacagcaac

SEQ ID NO: 718 - DNA, 30 bp, Artificial Sequence
  Synthetic Construct
tctctctctctctttttctctcagaacgga

SEQ ID NO: 719 - DNA, 30 bp, Artificial Sequence
  Synthetic Construct
caattgatacatttaaccctttagagacag

SEQ ID NO: 720 - DNA, 30 bp, Artificial Sequence
  Synthetic Construct
ctctctctctctctttttctctcagaacgg

SEQ ID NO: 721 - DNA, 30 bp, Artificial Sequence
  Synthetic Construct
ttctctctctctctctttttctctcagaac

SEQ ID NO: 722 - DNA, 30 bp, Artificial Sequence
  Synthetic Construct
cagaatgtatgcagcatggtctttttctct

SEQ ID NO: 723 - DNA, 30 bp, Artificial Sequence
  Synthetic Construct
taaaataaaactgtacatgatatgtattac

SEQ ID NO: 724 - DNA, 30 bp, Artificial Sequence
  Synthetic Construct
ctcctcacgttataaaataaaactgtacat

SEQ ID NO: 725 - DNA, 30 bp, Artificial Sequence
  Synthetic Construct
cctcctcacgttataaaataaaactgtaca

SEQ ID NO: 726 - DNA, 30 bp, Artificial Sequence
  Synthetic Construct
tcctcctcacgttataaaataaaactgtac

SEQ ID NO: 727 - DNA, 30 bp, Artificial Sequence
  Synthetic Construct
tctctctctctctctttttctctcagaacg

SEQ ID NO: 728 - DNA, 30 bp, Artificial Sequence
  Synthetic Construct
taggtagccattgttgtgagaaatacaata

SEQ ID NO: 729 - DNA, 30 bp, Artificial Sequence
  Synthetic Construct
ccaattgatacatttaaccctttagagaca

SEQ ID NO: 730 - DNA, 30 bp, Artificial Sequence
  Synthetic Construct
ttcctttccaattgatacatttaacccttt

SEQ ID NO: 731 - DNA, 30 bp, Artificial Sequence
  Synthetic Construct
ggtagccattgttgtgagaaatacaatata

SEQ ID NO: 732 - DNA, 30 bp, Artificial Sequence
  Synthetic Construct
ttgtgagaaatacaatatagaattatatgc

SEQ ID NO: 733 - DNA, 30 bp, Artificial Sequence
  Synthetic Construct
tgagaaatacaatatagaattatatgctag

SEQ ID NO: 734 - DNA, 30 bp, Artificial Sequence
  Synthetic Construct
tatgctagttcctaaggtttattacctcac

SEQ ID NO: 735 - DNA, 30 bp, Artificial Sequence
  Synthetic Construct
ctaaggtttattacctcacccaatgctgaa

SEQ ID NO: 736 - DNA, 30 bp, Artificial Sequence
  Synthetic Construct
attacctcacccaatgctgaattaagctac

SEQ ID NO: 737 - DNA, 30 bp, Artificial Sequence
  Synthetic Construct
ttacctcacccaatgctgaattaagctaca

SEQ ID NO: 738 - DNA, 30 bp, Artificial Sequence
  Synthetic Construct
cctcacccaatgctgaattaagctacaagt

SEQ ID NO: 739 - DNA, 30 bp, Artificial Sequence
  Synthetic Construct
agctacaagtttataacaagtagaaagaac

SEQ ID NO: 740 - DNA, 30 bp, Artificial Sequence
  Synthetic Construct
ataacaagtagaaagaaccatcgatgtggt

SEQ ID NO: 741 - DNA, 30 bp, Artificial Sequence
  Synthetic Construct
taacaagtagaaagaaccatcgatgtggtt

SEQ ID NO: 742 - DNA, 30 bp, Artificial Sequence
  Synthetic Construct
taatagatccaaggcactcatattttaaaa

SEQ ID NO: 743 - DNA, 30 bp, Artificial Sequence
  Synthetic Construct
aatagatccaaggcactcatattttaaaac

SEQ ID NO: 744 - DNA, 30 bp, Artificial Sequence
  Synthetic Construct
atagatccaaggcactcatattttaaaacc

SEQ ID NO: 745 - DNA, 30 bp, Artificial Sequence
  Synthetic Construct
taaaaccaaatgatagaataaacttgttct

SEQ ID NO: 746 - DNA, 30 bp, Artificial Sequence
  Synthetic Construct
aaaaccaaatgatagaataaacttgttctg

SEQ ID NO: 747 - DNA, 30 bp, Artificial Sequence
  Synthetic Construct
aaaccaaatgatagaataaacttgttctgt

SEQ ID NO: 748 - DNA, 30 bp, Artificial Sequence
  Synthetic Construct
cttcctttccaattgatacatttaaccctt

SEQ ID NO: 749 - DNA, 30 bp, Artificial Sequence
  Synthetic Construct
tcttcctttccaattgatacatttaaccct

SEQ ID NO: 750 - DNA, 30 bp, Artificial Sequence
  Synthetic Construct
ttcttcctttccaattgatacatttaaccc

SEQ ID NO: 751 - DNA, 30 bp, Artificial Sequence
  Synthetic Construct
tttcttcctttccaattgatacatttaacc

SEQ ID NO: 752 - DNA, 30 bp, Artificial Sequence
  Synthetic Construct
tggcagttgtctgcattaacctgttcatac

SEQ ID NO: 753 - DNA, 30 bp, Artificial Sequence
  Synthetic Construct
tcaattcaaggccttttttcttcctttcca

SEQ ID NO: 754 - DNA, 30 bp, Artificial Sequence
  Synthetic Construct
ctttccaattgatacatttaaccctttaga

SEQ ID NO: 755 - DNA, 30 bp, Artificial Sequence
  Synthetic Construct
gtcaattcaaggccttttttcttcctttcc

SEQ ID NO: 756 - DNA, 30 bp, Artificial Sequence
  Synthetic Construct
tgttaatttgtcaattcaaggccttttttc

SEQ ID NO: 757 - DNA, 30 bp, Artificial Sequence
  Synthetic Construct
ctgttaatttgtcaattcaaggcctttttt

SEQ ID NO: 758 - DNA, 30 bp, Artificial Sequence
  Synthetic Construct
tctgttaatttgtcaattcaaggccttttt

SEQ ID NO: 759 - DNA, 30 bp, Artificial Sequence
  Synthetic Construct
ttctgttaatttgtcaattcaaggcctttt

SEQ ID NO: 760 - DNA, 30 bp, Artificial Sequence
  Synthetic Construct
tgtttttctgttaatttgtcaattcaaggc

SEQ ID NO: 761 - DNA, 30 bp, Artificial Sequence
  Synthetic Construct
ttctgtttttctgttaatttgtcaattcaa

SEQ ID NO: 762 - DNA, 30 bp, Artificial Sequence
  Synthetic Construct
atttgtcaattcaaggccttttttcttcct

SEQ ID NO: 763 - DNA, 30 bp, Artificial Sequence
  Synthetic Construct
ttggcagttgtctgcattaacctgttcata

SEQ ID NO: 764 - DNA, 30 bp, Artificial Sequence
  Synthetic Construct
cttctatcaccctacattccagcatcttac

SEQ ID NO: 765 - DNA, 30 bp, Artificial Sequence
  Synthetic Construct
ttttggcagttgtctgcattaacctgttca

SEQ ID NO: 766 - DNA, 30 bp, Artificial Sequence
  Synthetic Construct
acagaaaaacagaacaagtttattctatca

SEQ ID NO: 767 - DNA, 30 bp, Artificial Sequence
  Synthetic Construct
attctatcatttggttttaaaatatgagtg

SEQ ID NO: 768 - DNA, 30 bp, Artificial Sequence
  Synthetic Construct
ttctatcatttggttttaaaatatgagtgc

SEQ ID NO: 769 - DNA, 30 bp, Artificial Sequence
  Synthetic Construct
tatcatttggttttaaaatatgagtgcctt

SEQ ID NO: 770 - DNA, 30 bp, Artificial Sequence
  Synthetic Construct
ggttttaaaatatgagtgccttggatctat

SEQ ID NO: 771 - DNA, 30 bp, Artificial Sequence
  Synthetic Construct
gttttaaaatatgagtgccttggatctatt

SEQ ID NO: 772 - DNA, 30 bp, Artificial Sequence
  Synthetic Construct
taaaatatgagtgccttggatctattaaaa

SEQ ID NO: 773 - DNA, 30 bp, Artificial Sequence
  Synthetic Construct
aaaatatgagtgccttggatctattaaaac

SEQ ID NO: 774 - DNA, 30 bp, Artificial Sequence
  Synthetic Construct
aaatatgagtgccttggatctattaaaacc

SEQ ID NO: 775 - DNA, 30 bp, Artificial Sequence
  Synthetic Construct
gatctattaaaaccacatcgatggttcttt

SEQ ID NO: 776 - DNA, 30 bp, Artificial Sequence
  Synthetic Construct
aaaccacatcgatggttctttctacttgtt

SEQ ID NO: 777 - DNA, 30 bp, Artificial Sequence
  Synthetic Construct
tttctacttgttataaacttgtagcttaat

SEQ ID NO: 778 - DNA, 30 bp, Artificial Sequence
  Synthetic Construct
ctacttgttataaacttgtagcttaattca

SEQ ID NO: 779 - DNA, 30 bp, Artificial Sequence
  Synthetic Construct
tacttgttataaacttgtagcttaattcag

SEQ ID NO: 780 - DNA, 30 bp, Artificial Sequence
  Synthetic Construct
acaaattaacagaaaaacagaacaagttta

SEQ ID NO: 781 - DNA, 30 bp, Artificial Sequence
  Synthetic Construct
ttataaacttgtagcttaattcagcattgg

SEQ ID NO: 782 - DNA, 30 bp, Artificial Sequence
  Synthetic Construct
tagcttaattcagcattgggtgaggtaata

SEQ ID NO: 783 - DNA, 30 bp, Artificial Sequence
  Synthetic Construct
attcagcattgggtgaggtaataaacctta

SEQ ID NO: 784 - DNA, 30 bp, Artificial Sequence
  Synthetic Construct
agcattgggtgaggtaataaaccttaggaa

SEQ ID NO: 785 - DNA, 30 bp, Artificial Sequence
  Synthetic Construct
ggtgaggtaataaaccttaggaactagcat

SEQ ID NO: 786 - DNA, 30 bp, Artificial Sequence
  Synthetic Construct
ggaactagcatataattctatattgtattt

SEQ ID NO: 787 - DNA, 30 bp, Artificial Sequence
  Synthetic Construct
tatattgtatttctcacaacaatggctacc

SEQ ID NO: 788 - DNA, 30 bp, Artificial Sequence
  Synthetic Construct
tatttctcacaacaatggctacctaaaaag

SEQ ID NO: 789 - DNA, 30 bp, Artificial Sequence
  Synthetic Construct
ctcacaacaatggctacctaaaaagatgac

SEQ ID NO: 790 - DNA, 30 bp, Artificial Sequence
  Synthetic Construct
tcacaacaatggctacctaaaaagatgacc

SEQ ID NO: 791 - DNA, 30 bp, Artificial Sequence
  Synthetic Construct
tgtcctagttaatcatcatttttcctttag

SEQ ID NO: 792 - DNA, 30 bp, Artificial Sequence
  Synthetic Construct
atcatcatttttcctttagtttaattttat

SEQ ID NO: 793 - DNA, 30 bp, Artificial Sequence
  Synthetic Construct
ttcctttagtttaattttataaacaaaact

SEQ ID NO: 794 - DNA, 30 bp, Artificial Sequence
  Synthetic Construct
tcctttagtttaattttataaacaaaactg

SEQ ID NO: 795 - DNA, 30 bp, Artificial Sequence
  Synthetic Construct
cctttagtttaattttataaacaaaactga

SEQ ID NO: 796 - DNA, 30 bp, Artificial Sequence
  Synthetic Construct
taaacttgtagcttaattcagcattgggtg

SEQ ID NO: 797 - DNA, 30 bp, Artificial Sequence
  Synthetic Construct
aattgacaaattaacagaaaaacagaacaa

SEQ ID NO: 798 - DNA, 30 bp, Artificial Sequence
  Synthetic Construct
gaaaggaagaaaaaaggccttgaattgaca

SEQ ID NO: 799 - DNA, 30 bp, Artificial Sequence
  Synthetic Construct
aatgtatcaattggaaaggaagaaaaaagg

SEQ ID NO: 800 - DNA, 30 bp, Artificial Sequence
  Synthetic Construct
ttttttaaacttagacagcatgtatggtat

SEQ ID NO: 801 - DNA, 30 bp, Artificial Sequence
  Synthetic Construct
tttttaaacttagacagcatgtatggtatg

SEQ ID NO: 802 - DNA, 30 bp, Artificial Sequence
  Synthetic Construct
ttttaaacttagacagcatgtatggtatgt

SEQ ID NO: 803 - DNA, 30 bp, Artificial Sequence
  Synthetic Construct
tttaaacttagacagcatgtatggtatgtt

SEQ ID NO: 804 - DNA, 30 bp, Artificial Sequence
  Synthetic Construct
ttaaacttagacagcatgtatggtatgtta

SEQ ID NO: 805 - DNA, 30 bp, Artificial Sequence
  Synthetic Construct
taaacttagacagcatgtatggtatgttat

SEQ ID NO: 806 - DNA, 30 bp, Artificial Sequence
  Synthetic Construct
aaacttagacagcatgtatggtatgttatg

SEQ ID NO: 807 - DNA, 30 bp, Artificial Sequence
  Synthetic Construct
aacttagacagcatgtatggtatgttatgg

SEQ ID NO: 808 - DNA, 30 bp, Artificial Sequence
  Synthetic Construct
gacagcatgtatggtatgttatggctattt

SEQ ID NO: 809 - DNA, 30 bp, Artificial Sequence
  Synthetic Construct
tggctattttaaattgtccctaattcgttg

SEQ ID NO: 810 - DNA, 30 bp, Artificial Sequence
  Synthetic Construct
taaattgtccctaattcgttgctgagcaaa

SEQ ID NO: 811 - DNA, 30 bp, Artificial Sequence
  Synthetic Construct
aaattgtccctaattcgttgctgagcaaac

SEQ ID NO: 812 - DNA, 30 bp, Artificial Sequence
  Synthetic Construct
aattgtccctaattcgttgctgagcaaaca

SEQ ID NO: 813 - DNA, 30 bp, Artificial Sequence
  Synthetic Construct
tccctaattcgttgctgagcaaacatgttg

SEQ ID NO: 814 - DNA, 30 bp, Artificial Sequence
  Synthetic Construct
gttgctgagcaaacatgttgctgtttccag

SEQ ID NO: 815 - DNA, 30 bp, Artificial Sequence
  Synthetic Construct
ctgagcaaacatgttgctgtttccagttcc

SEQ ID NO: 816 - DNA, 30 bp, Artificial Sequence
  Synthetic Construct
ctgtttccagttccgttctgagagaaaaag

SEQ ID NO: 817 - DNA, 30 bp, Artificial Sequence
  Synthetic Construct
accctctatagacagaatagatagcactga

SEQ ID NO: 818 - DNA, 30 bp, Artificial Sequence
  Synthetic Construct
gattaaccctctatagacagaatagatagc

SEQ ID NO: 819 - DNA, 30 bp, Artificial Sequence
  Synthetic Construct
ggattaaccctctatagacagaatagatag

SEQ ID NO: 820 - DNA, 30 bp, Artificial Sequence
  Synthetic Construct
taacgtgaggaggaaaaacagtctttggat

SEQ ID NO: 821 - DNA, 30 bp, Artificial Sequence
  Synthetic Construct
ataacgtgaggaggaaaaacagtctttgga

SEQ ID NO: 822 - DNA, 30 bp, Artificial Sequence
  Synthetic Construct
tataacgtgaggaggaaaaacagtctttgg

SEQ ID NO: 823 - DNA, 30 bp, Artificial Sequence
  Synthetic Construct
ctttagtttaattttataaacaaaactgat

SEQ ID NO: 824 - DNA, 30 bp, Artificial Sequence
  Synthetic Construct
ttttataacgtgaggaggaaaaacagtctt

SEQ ID NO: 825 - DNA, 30 bp, Artificial Sequence
  Synthetic Construct
tattttataacgtgaggaggaaaaacagtc

SEQ ID NO: 826 - DNA, 30 bp, Artificial Sequence
  Synthetic Construct
tgtaatacatatcatgtacagttttatttt

SEQ ID NO: 827 - DNA, 30 bp, Artificial Sequence
  Synthetic Construct
tgagagaaaaagagagagagagagaaaaag

SEQ ID NO: 828 - DNA, 30 bp, Artificial Sequence
  Synthetic Construct
cgttctgagagaaaaagagagagagagaga

SEQ ID NO: 829 - DNA, 30 bp, Artificial Sequence
  Synthetic Construct
cagttccgttctgagagaaaaagagagaga

SEQ ID NO: 830 - DNA, 30 bp, Artificial Sequence
  Synthetic Construct
ccagttccgttctgagagaaaaagagagag

SEQ ID NO: 831 - DNA, 30 bp, Artificial Sequence
  Synthetic Construct
attttataacgtgaggaggaaaaacagtct

SEQ ID NO: 832 - DNA, 30 bp, Artificial Sequence
  Synthetic Construct
agtttaattttataaacaaaactgattata

SEQ ID NO: 833 - DNA, 30 bp, Artificial Sequence
  Synthetic Construct
gtttaattttataaacaaaactgattatac

SEQ ID NO: 834 - DNA, 30 bp, Artificial Sequence
  Synthetic Construct
aattttataaacaaaactgattataccagt

SEQ ID NO: 835 - DNA, 30 bp, Artificial Sequence
  Synthetic Construct
aaaatactggcaccaaaagaaatagatcca

SEQ ID NO: 836 - DNA, 30 bp, Artificial Sequence
  Synthetic Construct
gttgtcaagtggacaatcaaatgataaact

SEQ ID NO: 837 - DNA, 30 bp, Artificial Sequence
  Synthetic Construct
tcaagtggacaatcaaatgataaactttaa

SEQ ID NO: 838 - DNA, 30 bp, Artificial Sequence
  Synthetic Construct
aagaccttgtataccatattgaaaggaaga

SEQ ID NO: 839 - DNA, 30 bp, Artificial Sequence
  Synthetic Construct
agaccttgtataccatattgaaaggaagag

SEQ ID NO: 840 - DNA, 30 bp, Artificial Sequence
  Synthetic Construct
tataccatattgaaaggaagaggctgacaa

SEQ ID NO: 841 - DNA, 30 bp, Artificial Sequence
  Synthetic Construct
aaaggaagaggctgacaataaggtttgaca

SEQ ID NO: 842 - DNA, 30 bp, Artificial Sequence
  Synthetic Construct
gacagaggggaacagaagaaaataatatga

SEQ ID NO: 843 - DNA, 30 bp, Artificial Sequence
  Synthetic Construct
acagaggggaacagaagaaaataatatgat

SEQ ID NO: 844 - DNA, 30 bp, Artificial Sequence
  Synthetic Construct
attagcacaacgtggtactatttgccattt

SEQ ID NO: 845 - DNA, 30 bp, Artificial Sequence
  Synthetic Construct
ttagcacaacgtggtactatttgccattta

SEQ ID NO: 846 - DNA, 30 bp, Artificial Sequence
  Synthetic Construct
gcacaacgtggtactatttgccatttaaaa

SEQ ID NO: 847 - DNA, 30 bp, Artificial Sequence
  Synthetic Construct
gccatttaaaactagaacaggtatataagc

SEQ ID NO: 848 - DNA, 30 bp, Artificial Sequence
  Synthetic Construct
ccatttaaaactagaacaggtatataagct

SEQ ID NO: 849 - DNA, 30 bp, Artificial Sequence
  Synthetic Construct
aaaactagaacaggtatataagctaatatt

SEQ ID NO: 850 - DNA, 30 bp, Artificial Sequence
  Synthetic Construct
aaactagaacaggtatataagctaatattg

SEQ ID NO: 851 - DNA, 30 bp, Artificial Sequence
  Synthetic Construct
atacaatgatgattaactatgaattcttaa

SEQ ID NO: 852 - DNA, 30 bp, Artificial Sequence
  Synthetic Construct
cttttccatacactgtgtgctatttgtgtt

SEQ ID NO: 853 - DNA, 30 bp, Artificial Sequence
  Synthetic Construct
atttcttttccatacactgtgtgctatttg

SEQ ID NO: 854 - DNA, 30 bp, Artificial Sequence
  Synthetic Construct
tacttcatttcttttccatacactgtgtgc

SEQ ID NO: 855 - DNA, 30 bp, Artificial Sequence
  Synthetic Construct
agagtagcagtatatatgtctgtgctccct

SEQ ID NO: 856 - DNA, 30 bp, Artificial Sequence
  Synthetic Construct
aagagtagcagtatatatgtctgtgctccc

SEQ ID NO: 857 - DNA, 30 bp, Artificial Sequence
  Synthetic Construct
taagagtagcagtatatatgtctgtgctcc

SEQ ID NO: 858 - DNA, 30 bp, Artificial Sequence
  Synthetic Construct
aaaaatactggcaccaaaagaaatagatcc

SEQ ID NO: 859 - DNA, 30 bp, Artificial Sequence
  Synthetic Construct
aaaaaagaagagaaagaattttaagagtag

SEQ ID NO: 860 - DNA, 30 bp, Artificial Sequence
  Synthetic Construct
aatgtgacattcttaaaaaaagaagagaaa

SEQ ID NO: 861 - DNA, 30 bp, Artificial Sequence
  Synthetic Construct
aaatgtgacattcttaaaaaaagaagagaa

SEQ ID NO: 862 - DNA, 30 bp, Artificial Sequence
  Synthetic Construct
catttaaatgtgacattcttaaaaaaagaa

SEQ ID NO: 863 - DNA, 30 bp, Artificial Sequence
  Synthetic Construct
agacttgcatttaaatgtgacattcttaaa

SEQ ID NO: 864 - DNA, 30 bp, Artificial Sequence
  Synthetic Construct
ttaagacttgcatttaaatgtgacattctt

SEQ ID NO: 865 - DNA, 30 bp, Artificial Sequence
  Synthetic Construct
actatgaattcttaagacttgcatttaaat

SEQ ID NO: 866 - DNA, 30 bp, Artificial Sequence
  Synthetic Construct
ttaaaaaaagaagagaaagaattttaagag

SEQ ID NO: 867 - DNA, 30 bp, Artificial Sequence
  Synthetic Construct
tgtatgtttttttttaaacttagacagcat

SEQ ID NO: 868 - DNA, 30 bp, Artificial Sequence
  Synthetic Construct
taaaaatactggcaccaaaagaaatagatc

SEQ ID NO: 869 - DNA, 30 bp, Artificial Sequence
  Synthetic Construct
ataatgtctttttaaaaatactggcaccaa

SEQ ID NO: 870 - DNA, 30 bp, Artificial Sequence
  Synthetic Construct
attttataaacaaaactgattataccagta

SEQ ID NO: 871 - DNA, 30 bp, Artificial Sequence
  Synthetic Construct
tataaacaaaactgattataccagtataaa

SEQ ID NO: 872 - DNA, 30 bp, Artificial Sequence
  Synthetic Construct
ataaacaaaactgattataccagtataaaa

SEQ ID NO: 873 - DNA, 30 bp, Artificial Sequence
  Synthetic Construct
taaacaaaactgattataccagtataaaag

SEQ ID NO: 874 - DNA, 30 bp, Artificial Sequence
  Synthetic Construct
taccagtataaaagctactttgctcctggt

SEQ ID NO: 875 - DNA, 30 bp, Artificial Sequence
  Synthetic Construct
gctcctggtgagagcttaaaagaaatgggc

SEQ ID NO: 876 - DNA, 30 bp, Artificial Sequence
  Synthetic Construct
ctcctggtgagagcttaaaagaaatgggct

SEQ ID NO: 877 - DNA, 30 bp, Artificial Sequence
  Synthetic Construct
aaagaaatgggctgttttgcccaaagtttt

SEQ ID NO: 878 - DNA, 30 bp, Artificial Sequence
  Synthetic Construct
tgcccaaagttttattttttttaaacaatg

SEQ ID NO: 879 - DNA, 30 bp, Artificial Sequence
  Synthetic Construct
gcccaaagttttattttttttaaacaatga

SEQ ID NO: 880 - DNA, 30 bp, Artificial Sequence
  Synthetic Construct
cccaaagttttattttttttaaacaatgat

SEQ ID NO: 881 - DNA, 30 bp, Artificial Sequence
  Synthetic Construct
tattttttttaaacaatgattaaattgaat

SEQ ID NO: 882 - DNA, 30 bp, Artificial Sequence
  Synthetic Construct
attttttttaaacaatgattaaattgaatg

SEQ ID NO: 883 - DNA, 30 bp, Artificial Sequence
  Synthetic Construct
ttttttttaaacaatgattaaattgaatgt

SEQ ID NO: 884 - DNA, 30 bp, Artificial Sequence
  Synthetic Construct
tttttaaacaatgattaaattgaatgtgta

SEQ ID NO: 885 - DNA, 30 bp, Artificial Sequence
  Synthetic Construct
ttttaaacaatgattaaattgaatgtgtaa

SEQ ID NO: 886 - DNA, 30 bp, Artificial Sequence
  Synthetic Construct
tttaaacaatgattaaattgaatgtgtaat

SEQ ID NO: 887 - DNA, 30 bp, Artificial Sequence
  Synthetic Construct
aataatgtctttttaaaaatactggcacca

SEQ ID NO: 888 - DNA, 30 bp, Artificial Sequence
  Synthetic Construct
ctttaataatgtctttttaaaaatactggc

SEQ ID NO: 889 - DNA, 30 bp, Artificial Sequence
  Synthetic Construct
gctttaataatgtctttttaaaaatactgg

SEQ ID NO: 890 - DNA, 30 bp, Artificial Sequence
  Synthetic Construct
tgaagatatttgctttaataatgtcttttt

SEQ ID NO: 891 - DNA, 30 bp, Artificial Sequence
  Synthetic Construct
atgaagatatttgctttaataatgtctttt

SEQ ID NO: 892 - DNA, 30 bp, Artificial Sequence
  Synthetic Construct
tatgaagatatttgctttaataatgtcttt

SEQ ID NO: 893 - DNA, 30 bp, Artificial Sequence
  Synthetic Construct
ttaaaaatactggcaccaaaagaaatagat

SEQ ID NO: 894 - DNA, 30 bp, Artificial Sequence
  Synthetic Construct
attttatgaagatatttgctttaataatgt

SEQ ID NO: 895 - DNA, 30 bp, Artificial Sequence
  Synthetic Construct
aatgtgtaatgtgcaaaagccctggaacgc

SEQ ID NO: 896 - DNA, 30 bp, Artificial Sequence
  Synthetic Construct
aattgaatgtgtaatgtgcaaaagccctgg

SEQ ID NO: 897 - DNA, 30 bp, Artificial Sequence
  Synthetic Construct
aacaatgattaaattgaatgtgtaatgtgc

SEQ ID NO: 898 - DNA, 30 bp, Artificial Sequence
  Synthetic Construct
aaacaatgattaaattgaatgtgtaatgtg

SEQ ID NO: 899 - DNA, 30 bp, Artificial Sequence
  Synthetic Construct
taaacaatgattaaattgaatgtgtaatgt

SEQ ID NO: 900 - DNA, 30 bp, Artificial Sequence
  Synthetic Construct
ttaaacaatgattaaattgaatgtgtaatg

SEQ ID NO: 901 - DNA, 30 bp, Artificial Sequence
  Synthetic Construct
aatacactagtaaggagttcattttatgaa

SEQ ID NO: 902 - DNA, 30 bp, Artificial Sequence
  Synthetic Construct
catgttgtgtatgtttttttttaaacttag

SEQ ID NO: 903 - DNA, 30 bp, Artificial Sequence
  Synthetic Construct
acatgttgtgtatgtttttttttaaactta

SEQ ID NO: 904 - DNA, 30 bp, Artificial Sequence
  Synthetic Construct
tgcaataatttacatgttgtgtatgttttt

SEQ ID NO: 905 - DNA, 30 bp, Artificial Sequence
  Synthetic Construct
cagccaggtagcaagccgcccttcctggcg

SEQ ID NO: 906 - DNA, 30 bp, Artificial Sequence
  Synthetic Construct
ctggcgacgccccccctccctcctctgcaa

SEQ ID NO: 907 - DNA, 30 bp, Artificial Sequence
  Synthetic Construct
tgcggcaagacgttcaaatttcagagcaac

SEQ ID NO: 908 - DNA, 30 bp, Artificial Sequence
  Synthetic Construct
aaatttcagagcaacctggtggtgcaccgg

SEQ ID NO: 909 - DNA, 30 bp, Artificial Sequence
  Synthetic Construct
cagagcaacctggtggtgcaccggcgcagc

SEQ ID NO: 910 - DNA, 30 bp, Artificial Sequence
  Synthetic Construct
agagcaacctggtggtgcaccggcgcagcc

SEQ ID NO: 911 - DNA, 30 bp, Artificial Sequence
  Synthetic Construct
gtgggcagcgccagcagcgcgctcaagtcc

SEQ ID NO: 912 - DNA, 30 bp, Artificial Sequence
  Synthetic Construct
aagagcgagaacgaccccaacctgatcccg

SEQ ID NO: 913 - DNA, 30 bp, Artificial Sequence
  Synthetic Construct
gggctgagcctggaggcggcgcgccaccac

SEQ ID NO: 914 - DNA, 30 bp, Artificial Sequence
  Synthetic Construct
agcgaggccttccaccaggtcctgggcgag

SEQ ID NO: 915 - DNA, 30 bp, Artificial Sequence
  Synthetic Construct
caccaggtcctgggcgagaagcataagcgc

SEQ ID NO: 916 - DNA, 30 bp, Artificial Sequence
  Synthetic Construct
cgacgaagactcggtggccggcgagtcgga

SEQ ID NO: 917 - DNA, 30 bp, Artificial Sequence
  Synthetic Construct
atggccgcggctgctccccgggcgagtcgg

SEQ ID NO: 918 - DNA, 30 bp, Artificial Sequence
  Synthetic Construct
tctaagcgcatcaagctcgagaaggagttc

SEQ ID NO: 919 - DNA, 30 bp, Artificial Sequence
  Synthetic Construct
gacctgcccccggccgcgatgcccaacacg

SEQ ID NO: 920 - DNA, 30 bp, Artificial Sequence
  Synthetic Construct
cttagcttcggagactccagacaatcgcct

SEQ ID NO: 921 - DNA, 30 bp, Artificial Sequence
  Synthetic Construct
gcttcggagactccagacaatcgccttttg

SEQ ID NO: 922 - DNA, 30 bp, Artificial Sequence
  Synthetic Construct
gtaagatgccttttagcgtgtacagtaccc

SEQ ID NO: 923 - DNA, 30 bp, Artificial Sequence
  Synthetic Construct
caaatgtgaaatttgtaagatgccttttag

SEQ ID NO: 924 - DNA, 30 bp, Artificial Sequence
  Synthetic Construct
acaaatgtgaaatttgtaagatgcctttta

SEQ ID NO: 925 - DNA, 30 bp, Artificial Sequence
  Synthetic Construct
taaatgcgagctgtgcaactatgcctgtgc

SEQ ID NO: 926 - DNA, 30 bp, Artificial Sequence
  Synthetic Construct
aagaactgtagcaatctcactgtccacagg

SEQ ID NO: 927 - DNA, 30 bp, Artificial Sequence
  Synthetic Construct
tgagtactgtgggaaagtcttcaagaactg

SEQ ID NO: 928 - DNA, 30 bp, Artificial Sequence
  Synthetic Construct
ctgcaaccattccagccaggtagcaagccg

SEQ ID NO: 929 - DNA, 30 bp, Artificial Sequence
  Synthetic Construct
gtggtccgggcccgggcaggcccagctcaa

SEQ ID NO: 930 - DNA, 30 bp, Artificial Sequence
  Synthetic Construct
cgcttctccacaccgcccggggagctggac

SEQ ID NO: 931 - DNA, 30 bp, Artificial Sequence
  Synthetic Construct
gcgcttctccacaccgcccggggagctgga

SEQ ID NO: 932 - DNA, 30 bp, Artificial Sequence
  Synthetic Construct
cctcctcgtcggagcactcctcggagaacg

SEQ ID NO: 933 - DNA, 30 bp, Artificial Sequence
  Synthetic Construct
gcctcctcgtcggagcactcctcggagaac

SEQ ID NO: 934 - DNA, 30 bp, Artificial Sequence
  Synthetic Construct
tgcctcctcgtcggagcactcctcggagaa

SEQ ID NO: 935 - DNA, 30 bp, Artificial Sequence
  Synthetic Construct
ggagactccagacaatcgccttttgcctcc

SEQ ID NO: 936 - DNA, 30 bp, Artificial Sequence
  Synthetic Construct
tccacaccgcccggggagctggacggaggg

SEQ ID NO: 937 - DNA, 30 bp, Artificial Sequence
  Synthetic Construct
taagatgccttttagcgtgtacagtaccct

SEQ ID NO: 938 - DNA, 30 bp, Artificial Sequence
  Synthetic Construct
gagagctggcagggaacacgtctagcccac

SEQ ID NO: 939 - DNA, 30 bp, Artificial Sequence
  Synthetic Construct
ctctaggagacttagagagctggcagggaa

SEQ ID NO: 940 - DNA, 30 bp, Artificial Sequence
  Synthetic Construct
aacattgatgttggtgttgtattattttgc

SEQ ID NO: 941 - DNA, 30 bp, Artificial Sequence
  Synthetic Construct
atgttggtgttgtattattttgcaggtaaa

SEQ ID NO: 942 - DNA, 30 bp, Artificial Sequence
  Synthetic Construct
gtgttgtattattttgcaggtaaagatgag

SEQ ID NO: 943 - DNA, 30 bp, Artificial Sequence
  Synthetic Construct
tattattttgcaggtaaagatgagcccagc

SEQ ID NO: 944 - DNA, 30 bp, Artificial Sequence
  Synthetic Construct
ttttgcaggtaaagatgagcccagcagcta

SEQ ID NO: 945 - DNA, 30 bp, Artificial Sequence
  Synthetic Construct
tgcaggtaaagatgagcccagcagctacac

SEQ ID NO: 946 - DNA, 30 bp, Artificial Sequence
  Synthetic Construct
gcaggtaaagatgagcccagcagctacaca

SEQ ID NO: 947 - DNA, 30 bp, Artificial Sequence
  Synthetic Construct
caggtaaagatgagcccagcagctacacat

SEQ ID NO: 948 - DNA, 30 bp, Artificial Sequence
  Synthetic Construct
caaacagccattcaccagtgcatggtttct

SEQ ID NO: 949 - DNA, 30 bp, Artificial Sequence
  Synthetic Construct
accagtgcatggtttctcttgcaacacgca

SEQ ID NO: 950 - DNA, 30 bp, Artificial Sequence
  Synthetic Construct
ctcttgcaacacgcacagaacactcatgga

SEQ ID NO: 951 - DNA, 30 bp, Artificial Sequence
  Synthetic Construct
tcttgcaacacgcacagaacactcatggat

SEQ ID NO: 952 - DNA, 30 bp, Artificial Sequence
  Synthetic Construct
caacacgcacagaacactcatggattaaga

SEQ ID NO: 953 - DNA, 30 bp, Artificial Sequence
  Synthetic Construct
agaatctacttagaaagcgaacacggaagt

SEQ ID NO: 954 - DNA, 30 bp, Artificial Sequence
  Synthetic Construct
gaaagcgaacacggaagtcccctgaccccg

SEQ ID NO: 955 - DNA, 30 bp, Artificial Sequence
  Synthetic Construct
gtatcccttcaggactaggtgcagaatgtc

SEQ ID NO: 956 - DNA, 30 bp, Artificial Sequence
  Synthetic Construct
aggactaggtgcagaatgtccttcccagcc

SEQ ID NO: 957 - DNA, 30 bp, Artificial Sequence
  Synthetic Construct
aatccaatggctatggagcctcccgccatg

SEQ ID NO: 958 - DNA, 30 bp, Artificial Sequence
  Synthetic Construct
acagggtgctgcggttgaatccaatggcta

SEQ ID NO: 959 - DNA, 30 bp, Artificial Sequence
  Synthetic Construct
gacagggtgctgcggttgaatccaatggct

SEQ ID NO: 960 - DNA, 30 bp, Artificial Sequence
  Synthetic Construct
gacccccaccgcatagagcgcctgggggcg

SEQ ID NO: 961 - DNA, 30 bp, Artificial Sequence
  Synthetic Construct
gtccaccaccgagacatcacttggaccccc

SEQ ID NO: 962 - DNA, 30 bp, Artificial Sequence
  Synthetic Construct
agtccaccaccgagacatcacttggacccc

SEQ ID NO: 963 - DNA, 30 bp, Artificial Sequence
  Synthetic Construct
tctaggagacttagagagctggcagggaac

SEQ ID NO: 964 - DNA, 30 bp, Artificial Sequence
  Synthetic Construct
cacccactccccccctgtttagtccaccac

SEQ ID NO: 965 - DNA, 30 bp, Artificial Sequence
  Synthetic Construct
cggcctggcagaagggcgctttccacccac

SEQ ID NO: 966 - DNA, 30 bp, Artificial Sequence
  Synthetic Construct
acctgctaagaataccaggatcagtatcga

SEQ ID NO: 967 - DNA, 30 bp, Artificial Sequence
  Synthetic Construct
aacctgctaagaataccaggatcagtatcg

SEQ ID NO: 968 - DNA, 30 bp, Artificial Sequence
  Synthetic Construct
cagacaataacccctttaacctgctaagaa

SEQ ID NO: 969 - DNA, 30 bp, Artificial Sequence
  Synthetic Construct
atattgcagacaataacccctttaacctgc

SEQ ID NO: 970 - DNA, 30 bp, Artificial Sequence
  Synthetic Construct
ccagccacctctccatgggattcatattgc

SEQ ID NO: 971 - DNA, 30 bp, Artificial Sequence
  Synthetic Construct
ccacccactccccccctgtttagtccacca

SEQ ID NO: 972 - DNA, 30 bp, Artificial Sequence
  Synthetic Construct
ttttccatacactgtgtgctatttgtgtta

SEQ ID NO: 973 - DNA, 30 bp, Artificial Sequence
  Synthetic Construct
tagcgtgtacagtaccctggagaaacacat

SEQ ID NO: 974 - DNA, 30 bp, Artificial Sequence
  Synthetic Construct
gcgtgtacagtaccctggagaaacacatga

SEQ ID NO: 975 - DNA, 30 bp, Artificial Sequence
  Synthetic Construct
tttttccttttttttttttttcctttatgt

SEQ ID NO: 976 - DNA, 30 bp, Artificial Sequence
  Synthetic Construct
ttccttttttttttttttcctttatgttct

SEQ ID NO: 977 - DNA, 30 bp, Artificial Sequence
  Synthetic Construct
tccttttttttttttttcctttatgttctc

SEQ ID NO: 978 - DNA, 30 bp, Artificial Sequence
  Synthetic Construct
ccttttttttttttttcctttatgttctca

SEQ ID NO: 979 - DNA, 30 bp, Artificial Sequence
  Synthetic Construct
cttttttttttttttcctttatgttctcac

SEQ ID NO: 980 - DNA, 30 bp, Artificial Sequence
  Synthetic Construct
tttttttttttcctttatgttctcaccgtt

SEQ ID NO: 981 - DNA, 30 bp, Artificial Sequence
  Synthetic Construct
ttttttttttcctttatgttctcaccgttt

SEQ ID NO: 982 - DNA, 30 bp, Artificial Sequence
  Synthetic Construct
tttttttttcctttatgttctcaccgtttg

SEQ ID NO: 983 - DNA, 30 bp, Artificial Sequence
  Synthetic Construct
ttttttttcctttatgttctcaccgtttga

SEQ ID NO: 984 - DNA, 30 bp, Artificial Sequence
  Synthetic Construct
tttttttcctttatgttctcaccgtttgaa

SEQ ID NO: 985 - DNA, 30 bp, Artificial Sequence
  Synthetic Construct
ttttttcctttatgttctcaccgtttgaat

SEQ ID NO: 986 - DNA, 30 bp, Artificial Sequence
  Synthetic Construct
tttttcctttatgttctcaccgtttgaatg

SEQ ID NO: 987 - DNA, 30 bp, Artificial Sequence
  Synthetic Construct
ttttcctttatgttctcaccgtttgaatgc

SEQ ID NO: 988 - DNA, 30 bp, Artificial Sequence
  Synthetic Construct
tttcctttatgttctcaccgtttgaatgca

SEQ ID NO: 989 - DNA, 30 bp, Artificial Sequence
  Synthetic Construct
ttcctttatgttctcaccgtttgaatgcat

SEQ ID NO: 990 - DNA, 30 bp, Artificial Sequence
  Synthetic Construct
tcctttatgttctcaccgtttgaatgcatg

SEQ ID NO: 991 - DNA, 30 bp, Artificial Sequence
  Synthetic Construct
cctttatgttctcaccgtttgaatgcatga

SEQ ID NO: 992 - DNA, 30 bp, Artificial Sequence
  Synthetic Construct
tcttgtgcaataatttacatgttgtgtatg

SEQ ID NO: 993 - DNA, 30 bp, Artificial Sequence
  Synthetic Construct
ctcttgtgcaataatttacatgttgtgtat

SEQ ID NO: 994 - DNA, 30 bp, Artificial Sequence
  Synthetic Construct
agcctttctcttgtgcaataatttacatgt

SEQ ID NO: 995 - DNA, 30 bp, Artificial Sequence
  Synthetic Construct
gagcctttctcttgtgcaataatttacatg

SEQ ID NO: 996 - DNA, 30 bp, Artificial Sequence
  Synthetic Construct
cgcaaactttgagcctttctcttgtgcaat

SEQ ID NO: 997 - DNA, 30 bp, Artificial Sequence
  Synthetic Construct
acgcaaactttgagcctttctcttgtgcaa

SEQ ID NO: 998 - DNA, 30 bp, Artificial Sequence
  Synthetic Construct
ctttttccttttttttttttttcctttatg

SEQ ID NO: 999 - DNA, 30 bp, Artificial Sequence
  Synthetic Construct
tacgcaaactttgagcctttctcttgtgca

SEQ ID NO: 1000 - DNA, 30 bp, Artificial Sequence
  Synthetic Construct
aatgcatgatctgtatggggcaatactatt

SEQ ID NO: 1001 - DNA, 30 bp, Artificial Sequence
  Synthetic Construct
gaatgcatgatctgtatggggcaatactat

SEQ ID NO: 1002 - DNA, 30 bp, Artificial Sequence
  Synthetic Construct
tcaccgtttgaatgcatgatctgtatgggg

SEQ ID NO: 1003 - DNA, 30 bp, Artificial Sequence
  Synthetic Construct
tgttctcaccgtttgaatgcatgatctgta

SEQ ID NO: 1004 - DNA, 30 bp, Artificial Sequence
  Synthetic Construct
atgttctcaccgtttgaatgcatgatctgt

SEQ ID NO: 1005 - DNA, 30 bp, Artificial Sequence
  Synthetic Construct
ctttatgttctcaccgtttgaatgcatgat

SEQ ID NO: 1006 - DNA, 30 bp, Artificial Sequence
  Synthetic Construct
cattttacgcaaactttgagcctttctctt

SEQ ID NO: 1007 - DNA, 30 bp, Artificial Sequence
  Synthetic Construct
agcgtgtacagtaccctggagaaacacatg

SEQ ID NO: 1008 - DNA, 30 bp, Artificial Sequence
  Synthetic Construct
tctttttccttttttttttttttcctttat

SEQ ID NO: 1009 - DNA, 30 bp, Artificial Sequence
  Synthetic Construct
tttctttttccttttttttttttttccttt

SEQ ID NO: 1010 - DNA, 30 bp, Artificial Sequence
  Synthetic Construct
aataatgatataaaaactgaatagaggtat

SEQ ID NO: 1011 - DNA, 30 bp, Artificial Sequence
  Synthetic Construct
atacccctccctcactcccacctgacaccc

SEQ ID NO: 1012 - DNA, 30 bp, Artificial Sequence
  Synthetic Construct
ttcaccactccccttccccatcgccctcca

SEQ ID NO: 1013 - DNA, 30 bp, Artificial Sequence
  Synthetic Construct
tcaccactccccttccccatcgccctccag

SEQ ID NO: 1014 - DNA, 30 bp, Artificial Sequence
  Synthetic Construct
caccactccccttccccatcgccctccagc

SEQ ID NO: 1015 - DNA, 30 bp, Artificial Sequence
  Synthetic Construct
accactccccttccccatcgccctccagcc

SEQ ID NO: 1016 - DNA, 30 bp, Artificial Sequence
  Synthetic Construct
cccatcgccctccagccccactccctgtag

SEQ ID NO: 1017 - DNA, 30 bp, Artificial Sequence
  Synthetic Construct
ttttctagtcccatgtgatttaaacaaaca

SEQ ID NO: 1018 - DNA, 30 bp, Artificial Sequence
  Synthetic Construct
tttctagtcccatgtgatttaaacaaacaa

SEQ ID NO: 1019 - DNA, 30 bp, Artificial Sequence
  Synthetic Construct
ttctagtcccatgtgatttaaacaaacaaa

SEQ ID NO: 1020 - DNA, 30 bp, Artificial Sequence
  Synthetic Construct
tctagtcccatgtgatttaaacaaacaaac

SEQ ID NO: 1021 - DNA, 30 bp, Artificial Sequence
  Synthetic Construct
ctagtcccatgtgatttaaacaaacaaaca

SEQ ID NO: 1022 - DNA, 30 bp, Artificial Sequence
  Synthetic Construct
tagtcccatgtgatttaaacaaacaaacaa

SEQ ID NO: 1023 - DNA, 30 bp, Artificial Sequence
  Synthetic Construct
aaacaaacaaacaaacaaacagaagtaacg

SEQ ID NO: 1024 - DNA, 30 bp, Artificial Sequence
  Synthetic Construct
aacaaacaaacaaacaaacagaagtaacga

SEQ ID NO: 1025 - DNA, 30 bp, Artificial Sequence
  Synthetic Construct
tcaccagcacacctgttttttttctttttc

SEQ ID NO: 1026 - DNA, 30 bp, Artificial Sequence
  Synthetic Construct
tttttctttttctttttcttttttcttttt

SEQ ID NO: 1027 - DNA, 30 bp, Artificial Sequence
  Synthetic Construct
ttttttctttttccttttttttttttttcc

SEQ ID NO: 1028 - DNA, 30 bp, Artificial Sequence
  Synthetic Construct
cttttttctttttccttttttttttttttc

SEQ ID NO: 1029 - DNA, 30 bp, Artificial Sequence
  Synthetic Construct
tcttttttctttttcctttttttttttttt

SEQ ID NO: 1030 - DNA, 30 bp, Artificial Sequence
  Synthetic Construct
ttcttttttctttttccttttttttttttt

SEQ ID NO: 1031 - DNA, 30 bp, Artificial Sequence
  Synthetic Construct
tttttcttttttctttttcctttttttttt

SEQ ID NO: 1032 - DNA, 30 bp, Artificial Sequence
  Synthetic Construct
ctttttcttttttctttttccttttttttt

SEQ ID NO: 1033 - DNA, 30 bp, Artificial Sequence
  Synthetic Construct
ttctttttccttttttttttttttccttta

SEQ ID NO: 1034 - DNA, 30 bp, Artificial Sequence
  Synthetic Construct
tctttttcttttttctttttcctttttttt

SEQ ID NO: 1035 - DNA, 30 bp, Artificial Sequence
  Synthetic Construct
tttttctttttcttttttctttttcctttt

SEQ ID NO: 1036 - DNA, 30 bp, Artificial Sequence
  Synthetic Construct
ctttttctttttcttttttctttttccttt

SEQ ID NO: 1037 - DNA, 30 bp, Artificial Sequence
  Synthetic Construct
tctttttctttttcttttttctttttcctt

SEQ ID NO: 1038 - DNA, 30 bp, Artificial Sequence
  Synthetic Construct
ttctttttctttttcttttttctttttcct

SEQ ID NO: 1039 - DNA, 30 bp, Artificial Sequence
  Synthetic Construct
tttctttttctttttcttttttctttttcc

SEQ ID NO: 1040 - DNA, 30 bp, Artificial Sequence
  Synthetic Construct
ttttctttttctttttcttttttctttttc

SEQ ID NO: 1041 - DNA, 30 bp, Artificial Sequence
  Synthetic Construct
ttctttttcttttttctttttccttttttt

SEQ ID NO: 1042 - DNA, 30 bp, Artificial Sequence
  Synthetic Construct
tttggcagttgtctgcattaacctgttcat

SEQ ID NO: 1043 - DNA, 30 bp, Artificial Sequence
  Synthetic Construct
tccatacactgtgtgctatttgtgttaaca

SEQ ID NO: 1044 - DNA, 30 bp, Artificial Sequence
  Synthetic Construct
catacactgtgtgctatttgtgttaacatg

SEQ ID NO: 1045 - DNA, 30 bp, Artificial Sequence
  Synthetic Construct
gtccctttccttctatcaccctacattcca

SEQ ID NO: 1046 - DNA, 30 bp, Artificial Sequence
  Synthetic Construct
tccctttccttctatcaccctacattccag

SEQ ID NO: 1047 - DNA, 30 bp, Artificial Sequence
  Synthetic Construct
ccttctatcaccctacattccagcatctta

SEQ ID NO: 1048 - DNA, 30 bp, Artificial Sequence
  Synthetic Construct
acctgcaaaataatacaacaccaacatcaa

SEQ ID NO: 1049 - DNA, 30 bp, Artificial Sequence
  Synthetic Construct
tatcaccctacattccagcatcttaccttc

SEQ ID NO: 1050 - DNA, 30 bp, Artificial Sequence
  Synthetic Construct
cagcatcttaccttcatatgcagtaaaaga

SEQ ID NO: 1051 - DNA, 30 bp, Artificial Sequence
  Synthetic Construct
ccttcatatgcagtaaaagaaagaaagaaa

SEQ ID NO: 1052 - DNA, 30 bp, Artificial Sequence
  Synthetic Construct
atatgcagtaaaagaaagaaagaaaaaaaa

SEQ ID NO: 1053 - DNA, 30 bp, Artificial Sequence
  Synthetic Construct
tgcagtttttttcattgccaaaaactaaat

SEQ ID NO: 1054 - DNA, 30 bp, Artificial Sequence
  Synthetic Construct
gcagtttttttcattgccaaaaactaaatg

SEQ ID NO: 1055 - DNA, 30 bp, Artificial Sequence
  Synthetic Construct
cagtttttttcattgccaaaaactaaatgg

SEQ ID NO: 1056 - DNA, 30 bp, Artificial Sequence
  Synthetic Construct
ttttcattgccaaaaactaaatggtgcttt

SEQ ID NO: 1057 - DNA, 30 bp, Artificial Sequence
  Synthetic Construct
tttcattgccaaaaactaaatggtgcttta

SEQ ID NO: 1058 - DNA, 30 bp, Artificial Sequence
  Synthetic Construct
ttcattgccaaaaactaaatggtgctttat

SEQ ID NO: 1059 - DNA, 30 bp, Artificial Sequence
  Synthetic Construct
tgtccctttccttctatcaccctacattcc

SEQ ID NO: 1060 - DNA, 30 bp, Artificial Sequence
  Synthetic Construct
tcattgccaaaaactaaatggtgctttata

SEQ ID NO: 1061 - DNA, 30 bp, Artificial Sequence
  Synthetic Construct
attgccaaaaactaaatggtgctttatatt

SEQ ID NO: 1062 - DNA, 30 bp, Artificial Sequence
  Synthetic Construct
ccaaaaactaaatggtgctttatatttaga

SEQ ID NO: 1063 - DNA, 30 bp, Artificial Sequence
  Synthetic Construct
atatttagattggaaagaatttcatatgca

SEQ ID NO: 1064 - DNA, 30 bp, Artificial Sequence
  Synthetic Construct
tatttagattggaaagaatttcatatgcaa

SEQ ID NO: 1065 - DNA, 30 bp, Artificial Sequence
  Synthetic Construct
agattggaaagaatttcatatgcaaagcat

SEQ ID NO: 1066 - DNA, 30 bp, Artificial Sequence
  Synthetic Construct
gattggaaagaatttcatatgcaaagcata

SEQ ID NO: 1067 - DNA, 30 bp, Artificial Sequence
  Synthetic Construct
gaaagaatttcatatgcaaagcatattaaa

SEQ ID NO: 1068 - DNA, 30 bp, Artificial Sequence
  Synthetic Construct
catatgcaaagcatattaaagagaaagccc

SEQ ID NO: 1069 - DNA, 30 bp, Artificial Sequence
  Synthetic Construct
atatgcaaagcatattaaagagaaagcccg

SEQ ID NO: 1070 - DNA, 30 bp, Artificial Sequence
  Synthetic Construct
aagagaaagcccgctttagtcaatactttt

SEQ ID NO: 1071 - DNA, 30 bp, Artificial Sequence
  Synthetic Construct
agtcaatacttttttgtaaatggcaatgca

SEQ ID NO: 1072 - DNA, 30 bp, Artificial Sequence
  Synthetic Construct
gtcaatacttttttgtaaatggcaatgcag

SEQ ID NO: 1073 - DNA, 30 bp, Artificial Sequence
  Synthetic Construct
tttgtaaatggcaatgcagaatattttgtt

SEQ ID NO: 1074 - DNA, 30 bp, Artificial Sequence
  Synthetic Construct
ttgtaaatggcaatgcagaatattttgtta

SEQ ID NO: 1075 - DNA, 30 bp, Artificial Sequence
  Synthetic Construct
cattgccaaaaactaaatggtgctttatat

SEQ ID NO: 1076 - DNA, 30 bp, Artificial Sequence
  Synthetic Construct
ttgtccctttccttctatcaccctacattc

SEQ ID NO: 1077 - DNA, 30 bp, Artificial Sequence
  Synthetic Construct
tgtagtgtgctttttgtccctttccttcta

SEQ ID NO: 1078 - DNA, 30 bp, Artificial Sequence
  Synthetic Construct
ttatgtagtgtgctttttgtccctttcctt

SEQ ID NO: 1079 - DNA, 30 bp, Artificial Sequence
  Synthetic Construct
tggtagtggaaaaaaaaaagacaggctgcc

SEQ ID NO: 1080 - DNA, 30 bp, Artificial Sequence
  Synthetic Construct
ggtagtggaaaaaaaaaagacaggctgcca

SEQ ID NO: 1081 - DNA, 30 bp, Artificial Sequence
  Synthetic Construct
gtagtggaaaaaaaaaagacaggctgccac

SEQ ID NO: 1082 - DNA, 30 bp, Artificial Sequence
  Synthetic Construct
ttttaatttggcaggataatatagtgcaaa

SEQ ID NO: 1083 - DNA, 30 bp, Artificial Sequence
  Synthetic Construct
tttaatttggcaggataatatagtgcaaat

SEQ ID NO: 1084 - DNA, 30 bp, Artificial Sequence
  Synthetic Construct
ttaatttggcaggataatatagtgcaaatt

SEQ ID NO: 1085 - DNA, 30 bp, Artificial Sequence
  Synthetic Construct
taatttggcaggataatatagtgcaaatta

SEQ ID NO: 1086 - DNA, 30 bp, Artificial Sequence
  Synthetic Construct
aatttggcaggataatatagtgcaaattat

SEQ ID NO: 1087 - DNA, 30 bp, Artificial Sequence
  Synthetic Construct
atttggcaggataatatagtgcaaattatt

SEQ ID NO: 1088 - DNA, 30 bp, Artificial Sequence
  Synthetic Construct
ggcaggataatatagtgcaaattatttgta

SEQ ID NO: 1089 - DNA, 30 bp, Artificial Sequence
  Synthetic Construct
gcaggataatatagtgcaaattatttgtat

SEQ ID NO: 1090 - DNA, 30 bp, Artificial Sequence
  Synthetic Construct
tttgtatgcttcaaaaaaaaaaaaaagaga

SEQ ID NO: 1091 - DNA, 30 bp, Artificial Sequence
  Synthetic Construct
gtatgcttcaaaaaaaaaaaaaagagagaa

SEQ ID NO: 1092 - DNA, 30 bp, Artificial Sequence
  Synthetic Construct
tatgcttcaaaaaaaaaaaaaagagagaaa

SEQ ID NO: 1093 - DNA, 30 bp, Artificial Sequence
  Synthetic Construct
aaaaaaaaaaaaaagagagaaacaaaaaag

SEQ ID NO: 1094 - DNA, 30 bp, Artificial Sequence
  Synthetic Construct
cagatgagaagccatataatggcggtttgg

SEQ ID NO: 1095 - DNA, 30 bp, Artificial Sequence
  Synthetic Construct
gggggagcctgctagaatgtcacatggatg

SEQ ID NO: 1096 - DNA, 30 bp, Artificial Sequence
  Synthetic Construct
gttatgtagtgtgctttttgtccctttcct

SEQ ID NO: 1097 - DNA, 30 bp, Artificial Sequence
  Synthetic Construct
gtttgttatgtagtgtgctttttgtccctt

SEQ ID NO: 1098 - DNA, 30 bp, Artificial Sequence
  Synthetic Construct
ctgctgccatactgtatgcagtactgcaag

SEQ ID NO: 1099 - DNA, 30 bp, Artificial Sequence
  Synthetic Construct
cctgctgccatactgtatgcagtactgcaa

SEQ ID NO: 1100 - DNA, 30 bp, Artificial Sequence
  Synthetic Construct
tcctgctgccatactgtatgcagtactgca

SEQ ID NO: 1101 - DNA, 30 bp, Artificial Sequence
  Synthetic Construct
ttcctgctgccatactgtatgcagtactgc

SEQ ID NO: 1102 - DNA, 30 bp, Artificial Sequence
  Synthetic Construct
tgtaaatggcaatgcagaatattttgttat

SEQ ID NO: 1103 - DNA, 30 bp, Artificial Sequence
  Synthetic Construct
ctttttcctgctgccatactgtatgcagta

SEQ ID NO: 1104 - DNA, 30 bp, Artificial Sequence
  Synthetic Construct
gttcctttttcctgctgccatactgtatgc

SEQ ID NO: 1105 - DNA, 30 bp, Artificial Sequence
  Synthetic Construct
tgttcctttttcctgctgccatactgtatg

SEQ ID NO: 1106 - DNA, 30 bp, Artificial Sequence
  Synthetic Construct
ttgttcctttttcctgctgccatactgtat

SEQ ID NO: 1107 - DNA, 30 bp, Artificial Sequence
  Synthetic Construct
tttgttcctttttcctgctgccatactgta

SEQ ID NO: 1108 - DNA, 30 bp, Artificial Sequence
  Synthetic Construct
tacatatccttttttgttcctttttcctgc

SEQ ID NO: 1109 - DNA, 30 bp, Artificial Sequence
  Synthetic Construct
ggggagcctgctagaatgtcacatggatgg

SEQ ID NO: 1110 - DNA, 30 bp, Artificial Sequence
  Synthetic Construct
ttcctttttcctgctgccatactgtatgca

SEQ ID NO: 1111 - DNA, 30 bp, Artificial Sequence
  Synthetic Construct
gtaaatggcaatgcagaatattttgttatt

SEQ ID NO: 1112 - DNA, 30 bp, Artificial Sequence
  Synthetic Construct
taaatggcaatgcagaatattttgttattg

SEQ ID NO: 1113 - DNA, 30 bp, Artificial Sequence
  Synthetic Construct
tgttattggccttttctattcctgtaatga

SEQ ID NO: 1114 - DNA, 30 bp, Artificial Sequence
  Synthetic Construct
ttatttttttttttatttagatgaccaaag

SEQ ID NO: 1115 - DNA, 30 bp, Artificial Sequence
  Synthetic Construct
tatttttttttttatttagatgaccaaagg

SEQ ID NO: 1116 - DNA, 30 bp, Artificial Sequence
  Synthetic Construct
atttttttttttatttagatgaccaaaggt

SEQ ID NO: 1117 - DNA, 30 bp, Artificial Sequence
  Synthetic Construct
tttttttttttatttagatgaccaaaggtc

SEQ ID NO: 1118 - DNA, 30 bp, Artificial Sequence
  Synthetic Construct
ttttttttatttagatgaccaaaggtcatt

SEQ ID NO: 1119 - DNA, 30 bp, Artificial Sequence
  Synthetic Construct
tttttttatttagatgaccaaaggtcatta

SEQ ID NO: 1120 - DNA, 30 bp, Artificial Sequence
  Synthetic Construct
ttttttatttagatgaccaaaggtcattac

SEQ ID NO: 1121 - DNA, 30 bp, Artificial Sequence
  Synthetic Construct
tttttatttagatgaccaaaggtcattaca

SEQ ID NO: 1122 - DNA, 30 bp, Artificial Sequence
  Synthetic Construct
ttttatttagatgaccaaaggtcattacaa

SEQ ID NO: 1123 - DNA, 30 bp, Artificial Sequence
  Synthetic Construct
tttatttagatgaccaaaggtcattacaac

SEQ ID NO: 1124 - DNA, 30 bp, Artificial Sequence
  Synthetic Construct
ttatttagatgaccaaaggtcattacaacc

SEQ ID NO: 1125 - DNA, 30 bp, Artificial Sequence
  Synthetic Construct
tatttagatgaccaaaggtcattacaacct

SEQ ID NO: 1126 - DNA, 30 bp, Artificial Sequence
  Synthetic Construct
atttagatgaccaaaggtcattacaacctg

SEQ ID NO: 1127 - DNA, 30 bp, Artificial Sequence
  Synthetic Construct
tttagatgaccaaaggtcattacaacctgg

SEQ ID NO: 1128 - DNA, 30 bp, Artificial Sequence
  Synthetic Construct
agatgaccaaaggtcattacaacctggctt

SEQ ID NO: 1129 - DNA, 30 bp, Artificial Sequence
  Synthetic Construct
gatgaccaaaggtcattacaacctggcttt

SEQ ID NO: 1130 - DNA, 30 bp, Artificial Sequence
  Synthetic Construct
caacctggctttttattgtatttgtttctg

SEQ ID NO: 1131 - DNA, 30 bp, Artificial Sequence
  Synthetic Construct
gaaaaaccactgtctgtgtttttttggcag

SEQ ID NO: 1132 - DNA, 30 bp, Artificial Sequence
  Synthetic Construct
tattggaaaaaccactgtctgtgttttttt

SEQ ID NO: 1133 - DNA, 30 bp, Artificial Sequence
  Synthetic Construct
agttctattggaaaaaccactgtctgtgtt

SEQ ID NO: 1134 - DNA, 30 bp, Artificial Sequence
  Synthetic Construct
ttaagttctattggaaaaaccactgtctgt

SEQ ID NO: 1135 - DNA, 30 bp, Artificial Sequence
  Synthetic Construct
gttaagttctattggaaaaaccactgtctg

SEQ ID NO: 1136 - DNA, 30 bp, Artificial Sequence
  Synthetic Construct
tggtctttgttaagttctattggaaaaacc

SEQ ID NO: 1137 - DNA, 30 bp, Artificial Sequence
  Synthetic Construct
tttttatttttttttttatttagatgacca

SEQ ID NO: 1138 - DNA, 30 bp, Artificial Sequence
  Synthetic Construct
ctggtctttgttaagttctattggaaaaac

SEQ ID NO: 1139 - DNA, 30 bp, Artificial Sequence
  Synthetic Construct
gtttctggtctttgttaagttctattggaa

SEQ ID NO: 1140 - DNA, 30 bp, Artificial Sequence
  Synthetic Construct
tatttgtttctggtctttgttaagttctat

SEQ ID NO: 1141 - DNA, 30 bp, Artificial Sequence
  Synthetic Construct
ttgtatttgtttctggtctttgttaagttc

SEQ ID NO: 1142 - DNA, 30 bp, Artificial Sequence
  Synthetic Construct
attgtatttgtttctggtctttgttaagtt

SEQ ID NO: 1143 - DNA, 30 bp, Artificial Sequence
  Synthetic Construct
tattgtatttgtttctggtctttgttaagt

SEQ ID NO: 1144 - DNA, 30 bp, Artificial Sequence
  Synthetic Construct
ttattgtatttgtttctggtctttgttaag

SEQ ID NO: 1145 - DNA, 30 bp, Artificial Sequence
  Synthetic Construct
tttctggtctttgttaagttctattggaaa

SEQ ID NO: 1146 - DNA, 30 bp, Artificial Sequence
  Synthetic Construct
ttggtagtggaaaaaaaaaagacaggctgc

SEQ ID NO: 1147 - DNA, 30 bp, Artificial Sequence
  Synthetic Construct
gtttttatttttttttttatttagatgacc

SEQ ID NO: 1148 - DNA, 30 bp, Artificial Sequence
  Synthetic Construct
ctttgtttttatttttttttttatttagat

SEQ ID NO: 1149 - DNA, 30 bp, Artificial Sequence
  Synthetic Construct
gttattggccttttctattcctgtaatgaa

SEQ ID NO: 1150 - DNA, 30 bp, Artificial Sequence
  Synthetic Construct
ttattggccttttctattcctgtaatgaaa

SEQ ID NO: 1151 - DNA, 30 bp, Artificial Sequence
  Synthetic Construct
ttggccttttctattcctgtaatgaaagct

SEQ ID NO: 1152 - DNA, 30 bp, Artificial Sequence
  Synthetic Construct
gccttttctattcctgtaatgaaagctgtt

SEQ ID NO: 1153 - DNA, 30 bp, Artificial Sequence
  Synthetic Construct
tctattcctgtaatgaaagctgtttgtcgt

SEQ ID NO: 1154 - DNA, 30 bp, Artificial Sequence
  Synthetic Construct
ctattcctgtaatgaaagctgtttgtcgta

SEQ ID NO: 1155 - DNA, 30 bp, Artificial Sequence
  Synthetic Construct
tattcctgtaatgaaagctgtttgtcgtaa

SEQ ID NO: 1156 - DNA, 30 bp, Artificial Sequence
  Synthetic Construct
ctgtaatgaaagctgtttgtcgtaacttga

SEQ ID NO: 1157 - DNA, 30 bp, Artificial Sequence
  Synthetic Construct
gtcgtaacttgaaattttatcttttactat

SEQ ID NO: 1158 - DNA, 30 bp, Artificial Sequence
  Synthetic Construct
tcgtaacttgaaattttatcttttactatg

SEQ ID NO: 1159 - DNA, 30 bp, Artificial Sequence
  Synthetic Construct
aaattttatcttttactatgggagtcacta

SEQ ID NO: 1160 - DNA, 30 bp, Artificial Sequence
  Synthetic Construct
tatcttttactatgggagtcactatttatt

SEQ ID NO: 1161 - DNA, 30 bp, Artificial Sequence
  Synthetic Construct
atcttttactatgggagtcactatttatta

SEQ ID NO: 1162 - DNA, 30 bp, Artificial Sequence
  Synthetic Construct
tcttttactatgggagtcactatttattat

SEQ ID NO: 1163 - DNA, 30 bp, Artificial Sequence
  Synthetic Construct
tactatgggagtcactatttattattgctt

SEQ ID NO: 1164 - DNA, 30 bp, Artificial Sequence
  Synthetic Construct
actatgggagtcactatttattattgctta

SEQ ID NO: 1165 - DNA, 30 bp, Artificial Sequence
  Synthetic Construct
ctatgggagtcactatttattattgcttat

SEQ ID NO: 1166 - DNA, 30 bp, Artificial Sequence
  Synthetic Construct
tctttgtttttatttttttttttatttaga

SEQ ID NO: 1167 - DNA, 30 bp, Artificial Sequence
  Synthetic Construct
ttctttgtttttatttttttttttatttag

SEQ ID NO: 1168 - DNA, 30 bp, Artificial Sequence
  Synthetic Construct
tttttctttgtttttatttttttttttatt

SEQ ID NO: 1169 - DNA, 30 bp, Artificial Sequence
  Synthetic Construct
atttttctttgtttttatttttttttttat

SEQ ID NO: 1170 - DNA, 30 bp, Artificial Sequence
  Synthetic Construct
tatttttctttgtttttattttttttttta

SEQ ID NO: 1171 - DNA, 30 bp, Artificial Sequence
  Synthetic Construct
atcttttatttttctttgtttttatttttt

SEQ ID NO: 1172 - DNA, 30 bp, Artificial Sequence
  Synthetic Construct
tttgtttttatttttttttttatttagatg

SEQ ID NO: 1173 - DNA, 30 bp, Artificial Sequence
  Synthetic Construct
gatcttttatttttctttgtttttattttt

SEQ ID NO: 1174 - DNA, 30 bp, Artificial Sequence
  Synthetic Construct
aaaacagaggcacttaatttgatcttttat

SEQ ID NO: 1175 - DNA, 30 bp, Artificial Sequence
  Synthetic Construct
tgtgccctgttcaaaacagaggcacttaat

SEQ ID NO: 1176 - DNA, 30 bp, Artificial Sequence
  Synthetic Construct
cttatgtgccctgttcaaaacagaggcact

SEQ ID NO: 1177 - DNA, 30 bp, Artificial Sequence
  Synthetic Construct
ttgcttatgtgccctgttcaaaacagaggc

SEQ ID NO: 1178 - DNA, 30 bp, Artificial Sequence
  Synthetic Construct
ttattgcttatgtgccctgttcaaaacaga

SEQ ID NO: 1179 - DNA, 30 bp, Artificial Sequence
  Synthetic Construct
attattgcttatgtgccctgttcaaaacag

SEQ ID NO: 1180 - DNA, 30 bp, Artificial Sequence
  Synthetic Construct
atttgatcttttatttttctttgtttttat

SEQ ID NO: 1181 - DNA, 30 bp, Artificial Sequence
  Synthetic Construct
tttggtagtggaaaaaaaaaagacaggctg

SEQ ID NO: 1182 - DNA, 30 bp, Artificial Sequence
  Synthetic Construct
aaaggtatcaatgtaccttttttggtagtg

SEQ ID NO: 1183 - DNA, 30 bp, Artificial Sequence
  Synthetic Construct
tcttaaaaggtatcaatgtaccttttttgg

SEQ ID NO: 1184 - DNA, 30 bp, Artificial Sequence
  Synthetic Construct
tctaatcagagatacagaggttgagtataa

SEQ ID NO: 1185 - DNA, 30 bp, Artificial Sequence
  Synthetic Construct
agtataaaataaacctgctcagataggaca

SEQ ID NO: 1186 - DNA, 30 bp, Artificial Sequence
  Synthetic Construct
agtgcactgtacaattttcccagtttacag

SEQ ID NO: 1187 - DNA, 30 bp, Artificial Sequence
  Synthetic Construct
tcccagtttacaggtctatacttaagggaa

SEQ ID NO: 1188 - DNA, 30 bp, Artificial Sequence
  Synthetic Construct
cccagtttacaggtctatacttaagggaaa

SEQ ID NO: 1189 - DNA, 30 bp, Artificial Sequence
  Synthetic Construct
ccagtttacaggtctatacttaagggaaaa

SEQ ID NO: 1190 - DNA, 30 bp, Artificial Sequence
  Synthetic Construct
acaggtctatacttaagggaaaagttgcaa

SEQ ID NO: 1191 - DNA, 30 bp, Artificial Sequence
  Synthetic Construct
caggtctatacttaagggaaaagttgcaag

SEQ ID NO: 1192 - DNA, 30 bp, Artificial Sequence
  Synthetic Construct
agggaaaagttgcaagaatgctgaaaaaaa

SEQ ID NO: 1193 - DNA, 30 bp, Artificial Sequence
  Synthetic Construct
caagaatgctgaaaaaaaattgaacacaat

SEQ ID NO: 1194 - DNA, 30 bp, Artificial Sequence
  Synthetic Construct
aacacaatctcattgaggagcattttttaa

SEQ ID NO: 1195 - DNA, 30 bp, Artificial Sequence
  Synthetic Construct
aggagcattttttaaaaactaaaaaaaaaa

SEQ ID NO: 1196 - DNA, 30 bp, Artificial Sequence
  Synthetic Construct
tttaaaaactaaaaaaaaaaaaactttgcc

SEQ ID NO: 1197 - DNA, 30 bp, Artificial Sequence
  Synthetic Construct
ttaaaaactaaaaaaaaaaaaactttgcca

SEQ ID NO: 1198 - DNA, 30 bp, Artificial Sequence
  Synthetic Construct
taaaaactaaaaaaaaaaaaactttgccag

SEQ ID NO: 1199 - DNA, 30 bp, Artificial Sequence
  Synthetic Construct
aaaaactaaaaaaaaaaaaactttgccagc

SEQ ID NO: 1200 - DNA, 30 bp, Artificial Sequence
  Synthetic Construct
aaaactaaaaaaaaaaaaactttgccagcc

SEQ ID NO: 1201 - DNA, 30 bp, Artificial Sequence
  Synthetic Construct
gcttctacagtgcaaggatttttttgtaca

SEQ ID NO: 1202 - DNA, 30 bp, Artificial Sequence
  Synthetic Construct
cgcttctacagtgcaaggatttttttgtac

SEQ ID NO: 1203 - DNA, 30 bp, Artificial Sequence
  Synthetic Construct
ctttcgcttctacagtgcaaggattttttt

SEQ ID NO: 1204 - DNA, 30 bp, Artificial Sequence
  Synthetic Construct
acatagaaatgaatgattgctttcgcttct

SEQ ID NO: 1205 - DNA, 30 bp, Artificial Sequence
  Synthetic Construct
caagcgctgtgaatggaaacagaatacact

SEQ ID NO: 1206 - DNA, 30 bp, Artificial Sequence
  Synthetic Construct
gacgcaacattgcaagcgctgtgaatggaa

SEQ ID NO: 1207 - DNA, 30 bp, Artificial Sequence
  Synthetic Construct
ctctaatcagagatacagaggttgagtata

SEQ ID NO: 1208 - DNA, 30 bp, Artificial Sequence
  Synthetic Construct
cttggacgcaacattgcaagcgctgtgaat

SEQ ID NO: 1209 - DNA, 30 bp, Artificial Sequence
  Synthetic Construct
agcttacttacttggacgcaacattgcaag

SEQ ID NO: 1210 - DNA, 30 bp, Artificial Sequence
  Synthetic Construct
actattgagcttacttacttggacgcaaca

SEQ ID NO: 1211 - DNA, 30 bp, Artificial Sequence
  Synthetic Construct
cttgactattgagcttacttacttggacgc

SEQ ID NO: 1212 - DNA, 30 bp, Artificial Sequence
  Synthetic Construct
acttgactattgagcttacttacttggacg

SEQ ID NO: 1213 - DNA, 30 bp, Artificial Sequence
  Synthetic Construct
ccagccatttacttgactattgagcttact

SEQ ID NO: 1214 - DNA, 30 bp, Artificial Sequence
  Synthetic Construct
gccagccatttacttgactattgagcttac

SEQ ID NO: 1215 - DNA, 30 bp, Artificial Sequence
  Synthetic Construct
cttacttggacgcaacattgcaagcgctgt

SEQ ID NO: 1216 - DNA, 30 bp, Artificial Sequence
  Synthetic Construct
tacagtgcaaggatttttttgtacaaaact

SEQ ID NO: 1217 - DNA, 30 bp, Artificial Sequence
  Synthetic Construct
tctctaatcagagatacagaggttgagtat

SEQ ID NO: 1218 - DNA, 30 bp, Artificial Sequence
  Synthetic Construct
aaatagcacttgactctgcctgtgatatct

SEQ ID NO: 1219 - DNA, 30 bp, Artificial Sequence
  Synthetic Construct
gtgttaacatggaagaggattcattgtttt

SEQ ID NO: 1220 - DNA, 30 bp, Artificial Sequence
  Synthetic Construct
tgttaacatggaagaggattcattgttttt

SEQ ID NO: 1221 - DNA, 30 bp, Artificial Sequence
  Synthetic Construct
acatggaagaggattcattgtttttatttt

SEQ ID NO: 1222 - DNA, 30 bp, Artificial Sequence
  Synthetic Construct
attgtttttatttttatttttttaattttt

SEQ ID NO: 1223 - DNA, 30 bp, Artificial Sequence
  Synthetic Construct
tttttatttttatttttttaattttttctt

SEQ ID NO: 1224 - DNA, 30 bp, Artificial Sequence
  Synthetic Construct
ttatttttatttttttaattttttcttttt

SEQ ID NO: 1225 - DNA, 30 bp, Artificial Sequence
  Synthetic Construct
tatttttatttttttaattttttctttttt

SEQ ID NO: 1226 - DNA, 30 bp, Artificial Sequence
  Synthetic Construct
atttttatttttttaattttttctttttta

SEQ ID NO: 1227 - DNA, 30 bp, Artificial Sequence
  Synthetic Construct
tttttatttttttaattttttcttttttat

SEQ ID NO: 1228 - DNA, 30 bp, Artificial Sequence
  Synthetic Construct
ttatttttttaattttttcttttttattaa

SEQ ID NO: 1229 - DNA, 30 bp, Artificial Sequence
  Synthetic Construct
tatttttttaattttttcttttttattaag

SEQ ID NO: 1230 - DNA, 30 bp, Artificial Sequence
  Synthetic Construct
atttttttaattttttcttttttattaagc

SEQ ID NO: 1231 - DNA, 30 bp, Artificial Sequence
  Synthetic Construct
tttttttaattttttcttttttattaagct

SEQ ID NO: 1232 - DNA, 30 bp, Artificial Sequence
  Synthetic Construct
ttttaattttttcttttttattaagctagc

SEQ ID NO: 1233 - DNA, 30 bp, Artificial Sequence
  Synthetic Construct
tttaattttttcttttttattaagctagca

SEQ ID NO: 1234 - DNA, 30 bp, Artificial Sequence
  Synthetic Construct
ttaattttttcttttttattaagctagcat

SEQ ID NO: 1235 - DNA, 30 bp, Artificial Sequence
  Synthetic Construct
taattttttcttttttattaagctagcatc

SEQ ID NO: 1236 - DNA, 30 bp, Artificial Sequence
  Synthetic Construct
gtgttcaaatagcacttgactctgcctgtg

SEQ ID NO: 1237 - DNA, 30 bp, Artificial Sequence
  Synthetic Construct
agctagcatctgccccagttggtgttcaaa

SEQ ID NO: 1238 - DNA, 30 bp, Artificial Sequence
  Synthetic Construct
ttaagctagcatctgccccagttggtgttc

SEQ ID NO: 1239 - DNA, 30 bp, Artificial Sequence
  Synthetic Construct
attaagctagcatctgccccagttggtgtt

SEQ ID NO: 1240 - DNA, 30 bp, Artificial Sequence
  Synthetic Construct
tattaagctagcatctgccccagttggtgt

SEQ ID NO: 1241 - DNA, 30 bp, Artificial Sequence
  Synthetic Construct
ttattaagctagcatctgccccagttggtg

SEQ ID NO: 1242 - DNA, 30 bp, Artificial Sequence
  Synthetic Construct
actctgcctgtgatatctgtatcttttctc

SEQ ID NO: 1243 - DNA, 30 bp, Artificial Sequence
  Synthetic Construct
tttattaagctagcatctgccccagttggt

SEQ ID NO: 1244 - DNA, 30 bp, Artificial Sequence
  Synthetic Construct
cttttttattaagctagcatctgccccagt

SEQ ID NO: 1245 - DNA, 30 bp, Artificial Sequence
  Synthetic Construct
tcttttttattaagctagcatctgccccag

SEQ ID NO: 1246 - DNA, 30 bp, Artificial Sequence
  Synthetic Construct
ttcttttttattaagctagcatctgcccca

SEQ ID NO: 1247 - DNA, 30 bp, Artificial Sequence
  Synthetic Construct
tttcttttttattaagctagcatctgcccc

SEQ ID NO: 1248 - DNA, 30 bp, Artificial Sequence
  Synthetic Construct
attttttcttttttattaagctagcatctg

SEQ ID NO: 1249 - DNA, 30 bp, Artificial Sequence
  Synthetic Construct
aattttttcttttttattaagctagcatct

SEQ ID NO: 1250 - DNA, 30 bp, Artificial Sequence
  Synthetic Construct
ttttttattaagctagcatctgccccagtt

SEQ ID NO: 1251 - DNA, 30 bp, Artificial Sequence
  Synthetic Construct
ccatacactgtgtgctatttgtgttaacat

SEQ ID NO: 1252 - DNA, 30 bp, Artificial Sequence
  Synthetic Construct
ttttgtacaaaacttttttaaatataaatg

SEQ ID NO: 1253 - DNA, 30 bp, Artificial Sequence
  Synthetic Construct
ttgtacaaaacttttttaaatataaatgtt

SEQ ID NO: 1254 - DNA, 30 bp, Artificial Sequence
  Synthetic Construct
gggaaaggtttaagattatatagtacttaa

SEQ ID NO: 1255 - DNA, 30 bp, Artificial Sequence
  Synthetic Construct
aagattatatagtacttaaatataggaaaa

SEQ ID NO: 1256 - DNA, 30 bp, Artificial Sequence
  Synthetic Construct
agattatatagtacttaaatataggaaaat

SEQ ID NO: 1257 - DNA, 30 bp, Artificial Sequence
  Synthetic Construct
tatagtacttaaatataggaaaatgcacac

SEQ ID NO: 1258 - DNA, 30 bp, Artificial Sequence
  Synthetic Construct
aatataggaaaatgcacactcatgttgatt

SEQ ID NO: 1259 - DNA, 30 bp, Artificial Sequence
  Synthetic Construct
attcctatgctaaaatacatttatggtctt

SEQ ID NO: 1260 - DNA, 30 bp, Artificial Sequence
  Synthetic Construct
ctatgctaaaatacatttatggtctttttt

SEQ ID NO: 1261 - DNA, 30 bp, Artificial Sequence
  Synthetic Construct
atggtcttttttctgtatttctagaatggt

SEQ ID NO: 1262 - DNA, 30 bp, Artificial Sequence
  Synthetic Construct
tggtcttttttctgtatttctagaatggta

SEQ ID NO: 1263 - DNA, 30 bp, Artificial Sequence
  Synthetic Construct
tttctgtatttctagaatggtatttgaatt

SEQ ID NO: 1264 - DNA, 30 bp, Artificial Sequence
  Synthetic Construct
ttctgtatttctagaatggtatttgaatta

SEQ ID NO: 1265 - DNA, 30 bp, Artificial Sequence
  Synthetic Construct
tctgtatttctagaatggtatttgaattaa

SEQ ID NO: 1266 - DNA, 30 bp, Artificial Sequence
  Synthetic Construct
ctgtatttctagaatggtatttgaattaaa

SEQ ID NO: 1267 - DNA, 30 bp, Artificial Sequence
  Synthetic Construct
tgtatttctagaatggtatttgaattaaat

SEQ ID NO: 1268 - DNA, 30 bp, Artificial Sequence
  Synthetic Construct
ctagaatggtatttgaattaaatgttcatc

SEQ ID NO: 1269 - DNA, 30 bp, Artificial Sequence
  Synthetic Construct
tagaatggtatttgaattaaatgttcatct

SEQ ID NO: 1270 - DNA, 30 bp, Artificial Sequence
  Synthetic Construct
gaattaaatgttcatctagtgttaggcact

SEQ ID NO: 1271 - DNA, 30 bp, Artificial Sequence
  Synthetic Construct
ttctcttaaaaggtatcaatgtaccttttt

SEQ ID NO: 1272 - DNA, 30 bp, Artificial Sequence
  Synthetic Construct
cttgttctcttaaaaggtatcaatgtacct

SEQ ID NO: 1273 - DNA, 30 bp, Artificial Sequence
  Synthetic Construct
actgttgcttgttctcttaaaaggtatcaa

SEQ ID NO: 1274 - DNA, 30 bp, Artificial Sequence
  Synthetic Construct
aactgttgcttgttctcttaaaaggtatca

SEQ ID NO: 1275 - DNA, 30 bp, Artificial Sequence
  Synthetic Construct
taactgttgcttgttctcttaaaaggtatc

SEQ ID NO: 1276 - DNA, 30 bp, Artificial Sequence
  Synthetic Construct
ttaactgttgcttgttctcttaaaaggtat

SEQ ID NO: 1277 - DNA, 30 bp, Artificial Sequence
  Synthetic Construct
taaaaaaaaaaaacatacattggggaaagg

SEQ ID NO: 1278 - DNA, 30 bp, Artificial Sequence
  Synthetic Construct
tatttttaactgttgcttgttctcttaaaa

SEQ ID NO: 1279 - DNA, 30 bp, Artificial Sequence
  Synthetic Construct
tattgaagcttgtatttttaactgttgctt

SEQ ID NO: 1280 - DNA, 30 bp, Artificial Sequence
  Synthetic Construct
atattgaagcttgtatttttaactgttgct

SEQ ID NO: 1281 - DNA, 30 bp, Artificial Sequence
  Synthetic Construct
ggcactatagtatttatattgaagcttgta

SEQ ID NO: 1282 - DNA, 30 bp, Artificial Sequence
  Synthetic Construct
atctagtgttaggcactatagtatttatat

SEQ ID NO: 1283 - DNA, 30 bp, Artificial Sequence
  Synthetic Construct
aatgttcatctagtgttaggcactatagta

SEQ ID NO: 1284 - DNA, 30 bp, Artificial Sequence
  Synthetic Construct
aattaaatgttcatctagtgttaggcacta

SEQ ID NO: 1285 - DNA, 30 bp, Artificial Sequence
  Synthetic Construct
aagcttgtatttttaactgttgcttgttct

SEQ ID NO: 1286 - DNA, 30 bp, Artificial Sequence
  Synthetic Construct
tttgtacaaaacttttttaaatataaatgt

SEQ ID NO: 1287 - DNA, 30 bp, Artificial Sequence
  Synthetic Construct
aggttgtaaaaaaaaaaaacatacattggg

SEQ ID NO: 1288 - DNA, 30 bp, Artificial Sequence
  Synthetic Construct
tatgccttggatacacaccgctcttcaggt

SEQ ID NO: 1289 - DNA, 30 bp, Artificial Sequence
  Synthetic Construct
tgtacaaaacttttttaaatataaatgtta

SEQ ID NO: 1290 - DNA, 30 bp, Artificial Sequence
  Synthetic Construct
gtacaaaacttttttaaatataaatgttaa

SEQ ID NO: 1291 - DNA, 30 bp, Artificial Sequence
  Synthetic Construct
tacaaaacttttttaaatataaatgttaag

SEQ ID NO: 1292 - DNA, 30 bp, Artificial Sequence
  Synthetic Construct
tttaaatataaatgttaagaaaaatttttt

SEQ ID NO: 1293 - DNA, 30 bp, Artificial Sequence
  Synthetic Construct
ttaaatataaatgttaagaaaaattttttt

SEQ ID NO: 1294 - DNA, 30 bp, Artificial Sequence
  Synthetic Construct
taaatataaatgttaagaaaaatttttttt

SEQ ID NO: 1295 - DNA, 30 bp, Artificial Sequence
  Synthetic Construct
aaatataaatgttaagaaaaatttttttta

SEQ ID NO: 1296 - DNA, 30 bp, Artificial Sequence
  Synthetic Construct
aatataaatgttaagaaaaattttttttaa

SEQ ID NO: 1297 - DNA, 30 bp, Artificial Sequence
  Synthetic Construct
agaaaaattttttttaaaaaacacttcatt

SEQ ID NO: 1298 - DNA, 30 bp, Artificial Sequence
  Synthetic Construct
tttttaaaaaacacttcattatgtttaggg

SEQ ID NO: 1299 - DNA, 30 bp, Artificial Sequence
  Synthetic Construct
ttttaaaaaacacttcattatgtttagggg

SEQ ID NO: 1300 - DNA, 30 bp, Artificial Sequence
  Synthetic Construct
tttaaaaaacacttcattatgtttaggggg

SEQ ID NO: 1301 - DNA, 30 bp, Artificial Sequence
  Synthetic Construct
ttaaaaaacacttcattatgtttagggggg

SEQ ID NO: 1302 - DNA, 30 bp, Artificial Sequence
  Synthetic Construct
taaaaaacacttcattatgtttagggggga

SEQ ID NO: 1303 - DNA, 30 bp, Artificial Sequence
  Synthetic Construct
aaaaaacacttcattatgtttaggggggaa

SEQ ID NO: 1304 - DNA, 30 bp, Artificial Sequence
  Synthetic Construct
aaaaacacttcattatgtttaggggggaac

SEQ ID NO: 1305 - DNA, 30 bp, Artificial Sequence
  Synthetic Construct
attatgtttaggggggaactgcattttagg

SEQ ID NO: 1306 - DNA, 30 bp, Artificial Sequence
  Synthetic Construct
aaaatggtagtggaaattctatgccttgga

SEQ ID NO: 1307 - DNA, 30 bp, Artificial Sequence
  Synthetic Construct
aaaaatggtagtggaaattctatgccttgg

SEQ ID NO: 1308 - DNA, 30 bp, Artificial Sequence
  Synthetic Construct
tccatttaaaaatggtagtggaaattctat

SEQ ID NO: 1309 - DNA, 30 bp, Artificial Sequence
  Synthetic Construct
ttatccatttaaaaatggtagtggaaattc

SEQ ID NO: 1310 - DNA, 30 bp, Artificial Sequence
  Synthetic Construct
caagacttgttatccatttaaaaatggtag

SEQ ID NO: 1311 - DNA, 30 bp, Artificial Sequence
  Synthetic Construct
gtggtgttacaagacttgttatccatttaa

SEQ ID NO: 1312 - DNA, 30 bp, Artificial Sequence
  Synthetic Construct
gatacacaccgctcttcaggttgtaaaaaa

SEQ ID NO: 1313 - DNA, 30 bp, Artificial Sequence
  Synthetic Construct
tcttggtggtgttacaagacttgttatcca

SEQ ID NO: 1314 - DNA, 30 bp, Artificial Sequence
  Synthetic Construct
gggttccattgtcttggtggtgttacaaga

SEQ ID NO: 1315 - DNA, 30 bp, Artificial Sequence
  Synthetic Construct
agggttccattgtcttggtggtgttacaag

SEQ ID NO: 1316 - DNA, 30 bp, Artificial Sequence
  Synthetic Construct
tagggttccattgtcttggtggtgttacaa

SEQ ID NO: 1317 - DNA, 30 bp, Artificial Sequence
  Synthetic Construct
ggggggaactgcattttagggttccattgt

SEQ ID NO: 1318 - DNA, 30 bp, Artificial Sequence
  Synthetic Construct
aggggggaactgcattttagggttccattg

SEQ ID NO: 1319 - DNA, 30 bp, Artificial Sequence
  Synthetic Construct
tgtttaggggggaactgcattttagggttc

SEQ ID NO: 1320 - DNA, 30 bp, Artificial Sequence
  Synthetic Construct
cattgtcttggtggtgttacaagacttgtt

SEQ ID NO: 1321 - DNA, 30 bp, Artificial Sequence
  Synthetic Construct
cctgcaaaataatacaacaccaacatcaat

SEQ ID NO: 1322 - RNA, 30 nt, Artificial Sequence
  Synthetic Construct
gacauaacacaccagggucaauacaacuuu

SEQ ID NO: 1323 - RNA, 30 nt, Artificial Sequence
  Synthetic Construct
gaagcuagucuagugcaagcuaacaguugc

SEQ ID NO: 1324 - RNA, 30 nt, Artificial Sequence
  Synthetic Construct
aagcuagucuagugcaagcuaacaguugcu

SEQ ID NO: 1325 - RNA, 30 nt, Artificial Sequence
  Synthetic Construct
cuuuuaucacaggcuccaggaaggguuugg

SEQ ID NO: 1326 - RNA, 30 nt, Artificial Sequence
  Synthetic Construct
uaucacaggcuccaggaaggguuuggccuc

SEQ ID NO: 1327 - RNA, 30 nt, Artificial Sequence
  Synthetic Construct
ucacaggcuccaggaaggguuuggccucug

SEQ ID NO: 1328 - RNA, 30 nt, Artificial Sequence
  Synthetic Construct
ggccucugauuagggugggggcgugggugg

SEQ ID NO: 1329 - RNA, 30 nt, Artificial Sequence
  Synthetic Construct
gccucugauuagggugggggcguggguggg

SEQ ID NO: 1330 - RNA, 30 nt, Artificial Sequence
  Synthetic Construct
aucacaggcuccaggaaggguuuggccucu

SEQ ID NO: 1331 - RNA, 30 nt, Artificial Sequence
  Synthetic Construct
uaccccacccacgcccccacccuaaucaga

SEQ ID NO: 1332 - RNA, 30 nt, Artificial Sequence
  Synthetic Construct
cuggagccugugauaaaagcaacuguuagc

SEQ ID NO: 1333 - RNA, 30 nt, Artificial Sequence
  Synthetic Construct
gcuugcacuagacuagcuucaaaguuguau

SEQ ID NO: 1334 - RNA, 30 nt, Artificial Sequence
  Synthetic Construct
cacuagacuagcuucaaaguuguauugacc

SEQ ID NO: 1335 - RNA, 30 nt, Artificial Sequence
  Synthetic Construct
aaaguuguauugacccugguguguuauguc

SEQ ID NO: 1336 - RNA, 30 nt, Artificial Sequence
  Synthetic Construct
uauugacccugguguguuaugucuaagagu

SEQ ID NO: 1337 - RNA, 30 nt, Artificial Sequence
  Synthetic Construct
acccugguguguuaugucuaagaguagaug

SEQ ID NO: 1338 - RNA, 30 nt, Artificial Sequence
  Synthetic Construct
gggugggggcgugggugggguagaagagga

SEQ ID NO: 1339 - RNA, 30 nt, Artificial Sequence
  Synthetic Construct
uuugcuuaaaaaaaagccaugacggcucuc

SEQ ID NO: 1340 - RNA, 30 nt, Artificial Sequence
  Synthetic Construct
uuuuuuuuugcuuaaaaaaaagccaugacg

SEQ ID NO: 1341 - RNA, 30 nt, Artificial Sequence
  Synthetic Construct
uuuuuuuugcuuaaaaaaaagccaugacgg

SEQ ID NO: 1342 - RNA, 30 nt, Artificial Sequence
  Synthetic Construct
uuuuuuugcuuaaaaaaaagccaugacggc

SEQ ID NO: 1343 - RNA, 30 nt, Artificial Sequence
  Synthetic Construct
uuuuuugcuuaaaaaaaagccaugacggcu

SEQ ID NO: 1344 - RNA, 30 nt, Artificial Sequence
  Synthetic Construct
uuuuugcuuaaaaaaaagccaugacggcuc

SEQ ID NO: 1345 - RNA, 30 nt, Artificial Sequence
  Synthetic Construct
uuuugcuuaaaaaaaagccaugacggcucu

SEQ ID NO: 1346 - RNA, 30 nt, Artificial Sequence
  Synthetic Construct
uugcuuaaaaaaaagccaugacggcucucc

SEQ ID NO: 1347 - RNA, 30 nt, Artificial Sequence
  Synthetic Construct
ugacauccaaaauaaauuagaaauaauaca

SEQ ID NO: 1348 - RNA, 30 nt, Artificial Sequence
  Synthetic Construct
gcuuaaaaaaaagccaugacggcucuccca

SEQ ID NO: 1349 - RNA, 30 nt, Artificial Sequence
  Synthetic Construct
cuuaaaaaaaagccaugacggcucucccac

SEQ ID NO: 1350 - RNA, 30 nt, Artificial Sequence
  Synthetic Construct
aaaaaaagccaugacggcucucccacaauu

SEQ ID NO: 1351 - RNA, 30 nt, Artificial Sequence
  Synthetic Construct
aucuucccugcgccaucuuuguauuauuuc

SEQ ID NO: 1352 - RNA, 30 nt, Artificial Sequence
  Synthetic Construct
ccugcgccaucuuuguauuauuucuaauuu

SEQ ID NO: 1353 - RNA, 30 nt, Artificial Sequence
  Synthetic Construct
guauuauuucuaauuuauuuuggaugucaa

SEQ ID NO: 1354 - RNA, 30 nt, Artificial Sequence
  Synthetic Construct
uuuuuuuuuugcuuaaaaaaaagccaugac

SEQ ID NO: 1355 - RNA, 30 nt, Artificial Sequence
  Synthetic Construct
ugcuuaaaaaaaagccaugacggcucuccc

SEQ ID NO: 1356 - RNA, 30 nt, Artificial Sequence
  Synthetic Construct
uuuuuuuuuuugcuuaaaaaaaagccauga

SEQ ID NO: 1357 - RNA, 30 nt, Artificial Sequence
  Synthetic Construct
uuuuuuuuuuuuuuuuuuuuuugcuuaaaa

SEQ ID NO: 1358 - RNA, 30 nt, Artificial Sequence
  Synthetic Construct
uuuuuuuuuuuuugcuuaaaaaaaagccau

SEQ ID NO: 1359 - RNA, 30 nt, Artificial Sequence
  Synthetic Construct
ccauuuuuuucaucucucucucucucucuc

SEQ ID NO: 1360 - RNA, 30 nt, Artificial Sequence
  Synthetic Construct
uuuucaucucucucucucucucucccucua

SEQ ID NO: 1361 - RNA, 30 nt, Artificial Sequence
  Synthetic Construct
uuucaucucucucucucucucucccucuau

SEQ ID NO: 1362 - RNA, 30 nt, Artificial Sequence
  Synthetic Construct
uucaucucucucucucucucucccucuauc

SEQ ID NO: 1363 - RNA, 30 nt, Artificial Sequence
  Synthetic Construct
ucaucucucucucucucucucccucuaucu

SEQ ID NO: 1364 - RNA, 30 nt, Artificial Sequence
  Synthetic Construct
caucucucucucucucucucccucuaucuc

SEQ ID NO: 1365 - RNA, 30 nt, Artificial Sequence
  Synthetic Construct
aucucucucucucucucucccucuaucucu

SEQ ID NO: 1366 - RNA, 30 nt, Artificial Sequence
  Synthetic Construct
ucucucucucccucuuuuuuuuuuuuuuuu

SEQ ID NO: 1367 - RNA, 30 nt, Artificial Sequence
  Synthetic Construct
uauuauuucuaauuuauuuuggaugucaaa

SEQ ID NO: 1368 - RNA, 30 nt, Artificial Sequence
  Synthetic Construct
uuuuuuuuuuuuuuuuuuugcuuaaaaaaa

SEQ ID NO: 1369 - RNA, 30 nt, Artificial Sequence
  Synthetic Construct
uuuuuuuuuuuuuuuuuugcuuaaaaaaaa

SEQ ID NO: 1370 - RNA, 30 nt, Artificial Sequence
  Synthetic Construct
uuuuuuuuuuuuuuuuugcuuaaaaaaaag

SEQ ID NO: 1371 - RNA, 30 nt, Artificial Sequence
  Synthetic Construct
uuuuuuuuuuuuuuuugcuuaaaaaaaagc

SEQ ID NO: 1372 - RNA, 30 nt, Artificial Sequence
  Synthetic Construct
uuuuuuuuuuuuuuugcuuaaaaaaaagcc

SEQ ID NO: 1373 - RNA, 30 nt, Artificial Sequence
  Synthetic Construct
uuuuuuuuuuuuuugcuuaaaaaaaagcca

SEQ ID NO: 1374 - RNA, 30 nt, Artificial Sequence
  Synthetic Construct
uuuuuuuuuuuugcuuaaaaaaaagccaug

SEQ ID NO: 1375 - RNA, 30 nt, Artificial Sequence
  Synthetic Construct
uuucuaauuuauuuuggaugucaaaaggca

SEQ ID NO: 1376 - RNA, 30 nt, Artificial Sequence
  Synthetic Construct
cucuggagucuccuucuuucuaacccggcu

SEQ ID NO: 1377 - RNA, 30 nt, Artificial Sequence
  Synthetic Construct
uaauuuauuuuggaugucaaaaggcacuga

SEQ ID NO: 1378 - RNA, 30 nt, Artificial Sequence
  Synthetic Construct
cuuacgcgagaauucccguuugcuuaagug

SEQ ID NO: 1379 - RNA, 30 nt, Artificial Sequence
  Synthetic Construct
cgcgagaauucccguuugcuuaagugcugg

SEQ ID NO: 1380 - RNA, 30 nt, Artificial Sequence
  Synthetic Construct
ccguuugcuuaagugcugggguuugccuug

SEQ ID NO: 1381 - RNA, 30 nt, Artificial Sequence
  Synthetic Construct
gcuuaagugcugggguuugccuugcuugcg

SEQ ID NO: 1382 - RNA, 30 nt, Artificial Sequence
  Synthetic Construct
cuuaagugcugggguuugccuugcuugcgg

SEQ ID NO: 1383 - RNA, 30 nt, Artificial Sequence
  Synthetic Construct
agugcugggguuugccuugcuugcggcgag

SEQ ID NO: 1384 - RNA, 30 nt, Artificial Sequence
  Synthetic Construct
gccuugcuugcggcgagacauggugggcug

SEQ ID NO: 1385 - RNA, 30 nt, Artificial Sequence
  Synthetic Construct
ccuugcuugcggcgagacauggugggcugc

SEQ ID NO: 1386 - RNA, 30 nt, Artificial Sequence
  Synthetic Construct
cuugcggcgagacauggugggcugcggggc

SEQ ID NO: 1387 - RNA, 30 nt, Artificial Sequence
  Synthetic Construct
cggcgagacauggugggcugcggggcgggc

SEQ ID NO: 1388 - RNA, 30 nt, Artificial Sequence
  Synthetic Construct
acaucgggagagccggguuagaaagaagga

SEQ ID NO: 1389 - RNA, 30 nt, Artificial Sequence
  Synthetic Construct
gaaagaaggagacuccagagaaaauaucuu

SEQ ID NO: 1390 - RNA, 30 nt, Artificial Sequence
  Synthetic Construct
aucagugccuuuugacauccaaaauaaauu

SEQ ID NO: 1391 - RNA, 30 nt, Artificial Sequence
  Synthetic Construct
ugggagagccgucauggcuuuuuuuuaagc

SEQ ID NO: 1392 - RNA, 30 nt, Artificial Sequence
  Synthetic Construct
gacauccaaaauaaauuagaaauaauacaa

SEQ ID NO: 1393 - RNA, 30 nt, Artificial Sequence
  Synthetic Construct
gguuacuuacgcgagaauucccguuugcuu

SEQ ID NO: 1394 - RNA, 30 nt, Artificial Sequence
  Synthetic Construct
uuggguuacuuacgcgagaauucccguuug

SEQ ID NO: 1395 - RNA, 30 nt, Artificial Sequence
  Synthetic Construct
cuauuauuggguuacuuacgcgagaauucc

SEQ ID NO: 1396 - RNA, 30 nt, Artificial Sequence
  Synthetic Construct
uuacuauuauuggguuacuuacgcgagaau

SEQ ID NO: 1397 - RNA, 30 nt, Artificial Sequence
  Synthetic Construct
auuuuggaugucaaaaggcacugaugaaga

SEQ ID NO: 1398 - RNA, 30 nt, Artificial Sequence
  Synthetic Construct
uuuuggaugucaaaaggcacugaugaagau

SEQ ID NO: 1399 - RNA, 30 nt, Artificial Sequence
  Synthetic Construct
uggaugucaaaaggcacugaugaagauauu

SEQ ID NO: 1400 - RNA, 30 nt, Artificial Sequence
  Synthetic Construct
ggaugucaaaaggcacugaugaagauauuu

SEQ ID NO: 1401 - RNA, 30 nt, Artificial Sequence
  Synthetic Construct
gaugucaaaaggcacugaugaagauauuuu

SEQ ID NO: 1402 - RNA, 30 nt, Artificial Sequence
  Synthetic Construct
ucucuggagucuccuucuuucuaacccggc

SEQ ID NO: 1403 - RNA, 30 nt, Artificial Sequence
  Synthetic Construct
gccauuuuuuucaucucucucucucucucu

SEQ ID NO: 1404 - RNA, 30 nt, Artificial Sequence
  Synthetic Construct
cuaauuuauuuuggaugucaaaaggcacug

SEQ ID NO: 1405 - RNA, 30 nt, Artificial Sequence
  Synthetic Construct
ucuggagucuccuucuuucuaacccggcuc

SEQ ID NO: 1406 - RNA, 30 nt, Artificial Sequence
  Synthetic Construct
cuaacccggcucucccgaugugaaccgagc

SEQ ID NO: 1407 - RNA, 30 nt, Artificial Sequence
  Synthetic Construct
uaacccggcucucccgaugugaaccgagcc

SEQ ID NO: 1408 - RNA, 30 nt, Artificial Sequence
  Synthetic Construct
agcaaacgggaauucucgcguaaguaaccc

SEQ ID NO: 1409 - RNA, 30 nt, Artificial Sequence
  Synthetic Construct
ucgcguaaguaacccaauaauaguaauaau

SEQ ID NO: 1410 - RNA, 30 nt, Artificial Sequence
  Synthetic Construct
uuaauaauuauuauuacuauuauuggguua

SEQ ID NO: 1411 - RNA, 30 nt, Artificial Sequence
  Synthetic Construct
auaauuauuauuacuauuauuggguuacuu

SEQ ID NO: 1412 - RNA, 30 nt, Artificial Sequence
  Synthetic Construct
uuauuacuauuauuggguuacuuacgcgag

SEQ ID NO: 1413 - RNA, 30 nt, Artificial Sequence
  Synthetic Construct
uuucuaacccggcucucccgaugugaaccg

SEQ ID NO: 1414 - RNA, 30 nt, Artificial Sequence
  Synthetic Construct
ugccauuuuuuucaucucucucucucucuc

SEQ ID NO: 1415 - RNA, 30 nt, Artificial Sequence
  Synthetic Construct
gaaauaauacaaagauggcgcagggaagau

SEQ ID NO: 1416 - RNA, 30 nt, Artificial Sequence
  Synthetic Construct
aacuugcagcucaggggggcuuuugccauu

SEQ ID NO: 1417 - RNA, 30 nt, Artificial Sequence
  Synthetic Construct
cagcucaggggggcuuuugccauuuuuuuc

SEQ ID NO: 1418 - RNA, 30 nt, Artificial Sequence
  Synthetic Construct
uuuuaagcaaaaaaaaaaaaaaaaaaaaaa

SEQ ID NO: 1419 - RNA, 30 nt, Artificial Sequence
  Synthetic Construct
uuuaagcaaaaaaaaaaaaaaaaaaaaaaa

SEQ ID NO: 1420 - RNA, 30 nt, Artificial Sequence
  Synthetic Construct
uuaagcaaaaaaaaaaaaaaaaaaaaaaaa

SEQ ID NO: 1421 - RNA, 30 nt, Artificial Sequence
  Synthetic Construct
uaagcaaaaaaaaaaaaaaaaaaaaaaaaa

SEQ ID NO: 1422 - RNA, 30 nt, Artificial Sequence
  Synthetic Construct
acauccaaaauaaauuagaaauaauacaaa

SEQ ID NO: 1423 - RNA, 30 nt, Artificial Sequence
  Synthetic Construct
uuuuuaagcaaaaaaaaaaaaaaaaaaaaa

SEQ ID NO: 1424 - RNA, 30 nt, Artificial Sequence
  Synthetic Construct
agcaaaaaaaaaaaaaaaaaaaaaaaaaaa

SEQ ID NO: 1425 - RNA, 30 nt, Artificial Sequence
  Synthetic Construct
aagugcggacgugacgucccugcgaacuug

SEQ ID NO: 1426 - RNA, 28 nt, Artificial Sequence
  Synthetic Construct
aacgucaggagucuggauggacagagac

SEQ ID NO: 1427 - RNA, 30 nt, Artificial Sequence
  Synthetic Construct
aaguucgcagggacgucacguccgcacuug

SEQ ID NO: 1428 - RNA, 30 nt, Artificial Sequence
  Synthetic Construct
aagcaaaaaaaaaaaaaaaaaaaaaaaaaa

SEQ ID NO: 1429 - RNA, 30 nt, Artificial Sequence
  Synthetic Construct
gcagggacgucacguccgcacuugaacuug

SEQ ID NO: 1430 - RNA, 30 nt, Artificial Sequence
  Synthetic Construct
uaucgagcacaaacggaaacaaugcaaugg

SEQ ID NO: 1431 - RNA, 30 nt, Artificial Sequence
  Synthetic Construct
aucgagcacaaacggaaacaaugcaauggc

SEQ ID NO: 1432 - RNA, 30 nt, Artificial Sequence
  Synthetic Construct
ucgagcacaaacggaaacaaugcaauggca

SEQ ID NO: 1433 - RNA, 30 nt, Artificial Sequence
  Synthetic Construct
gaaaaagcuguggauaagccaccuuccccu

SEQ ID NO: 1434 - RNA, 30 nt, Artificial Sequence
  Synthetic Construct
gcauccaggucacgccagaggaugacgauu

SEQ ID NO: 1435 - RNA, 30 nt, Artificial Sequence
  Synthetic Construct
accaaucgagaugaaaaaagcauccaaucc

SEQ ID NO: 1436 - RNA, 30 nt, Artificial Sequence
  Synthetic Construct
uuuaucaacgucaucuagaggaauuugccc

SEQ ID NO: 1437 - RNA, 30 nt, Artificial Sequence
  Synthetic Construct
aucaacgucaucuagaggaauuugccccaa

SEQ ID NO: 1438 - RNA, 30 nt, Artificial Sequence
  Synthetic Construct
ucaacgucaucuagaggaauuugccccaaa

SEQ ID NO: 1439 - RNA, 30 nt, Artificial Sequence
  Synthetic Construct
uuaucgagcacaaacggaaacaaugcaaug

SEQ ID NO: 1440 - RNA, 30 nt, Artificial Sequence
  Synthetic Construct
cccuucaccaaucgagaugaaaaaagcauc

SEQ ID NO: 1441 - RNA, 30 nt, Artificial Sequence
  Synthetic Construct
uuuuuaucgagcacaaacggaaacaaugca

SEQ ID NO: 1442 - RNA, 30 nt, Artificial Sequence
  Synthetic Construct
aagccauucuuacagaugaugaaccagacc

SEQ ID NO: 1443 - RNA, 30 nt, Artificial Sequence
  Synthetic Construct
ggggacauucuuauuuuuaucgagcacaaa

SEQ ID NO: 1444 - RNA, 30 nt, Artificial Sequence
  Synthetic Construct
ccauugggggacauucuuauuuuuaucgag

SEQ ID NO: 1445 - RNA, 30 nt, Artificial Sequence
  Synthetic Construct
ggagcuccagaaggggaucaugaccuccuc

SEQ ID NO: 1446 - RNA, 30 nt, Artificial Sequence
  Synthetic Construct
cagaugaugaaccagaccacggcccguugg

SEQ ID NO: 1447 - RNA, 30 nt, Artificial Sequence
  Synthetic Construct
uuacagaugaugaaccagaccacggcccgu

SEQ ID NO: 1448 - RNA, 30 nt, Artificial Sequence
  Synthetic Construct
uccaaccacagccgagccucuugaagccau

SEQ ID NO: 1449 - RNA, 30 nt, Artificial Sequence
  Synthetic Construct
cuccaaccacagccgagccucuugaagcca

SEQ ID NO: 1450 - RNA, 30 nt, Artificial Sequence
  Synthetic Construct
uuucuccaaccacagccgagccucuugaag

SEQ ID NO: 1451 - RNA, 30 nt, Artificial Sequence
  Synthetic Construct
guuucuccaaccacagccgagccucuugaa

SEQ ID NO: 1452 - RNA, 30 nt, Artificial Sequence
  Synthetic Construct
uguuucuccaaccacagccgagccucuuga

SEQ ID NO: 1453 - RNA, 30 nt, Artificial Sequence
  Synthetic Construct
ugcuuuuguuucuccaaccacagccgagcc

SEQ ID NO: 1454 - RNA, 30 nt, Artificial Sequence
  Synthetic Construct
uuauuuuuaucgagcacaaacggaaacaau

SEQ ID NO: 1455 - RNA, 30 nt, Artificial Sequence
  Synthetic Construct
gccccaaacaggaacacauagcagguaaau

SEQ ID NO: 1456 - RNA, 30 nt, Artificial Sequence
  Synthetic Construct
ucuccuugcuucucauuuaccugcuaugug

SEQ ID NO: 1457 - RNA, 30 nt, Artificial Sequence
  Synthetic Construct
cuccuugcuucucauuuaccugcuaugugu

SEQ ID NO: 1458 - RNA, 30 nt, Artificial Sequence
  Synthetic Construct
ucuaagcagaggcugccauugcauuguuuc

SEQ ID NO: 1459 - RNA, 30 nt, Artificial Sequence
  Synthetic Construct
cuaagcagaggcugccauugcauuguuucc

SEQ ID NO: 1460 - RNA, 30 nt, Artificial Sequence
  Synthetic Construct
uaagcagaggcugccauugcauuguuuccg

SEQ ID NO: 1461 - RNA, 30 nt, Artificial Sequence
  Synthetic Construct
cauuguuuccguuugugcucgauaaaaaua

SEQ ID NO: 1462 - RNA, 30 nt, Artificial Sequence
  Synthetic Construct
uuuccguuugugcucgauaaaaauaagaau

SEQ ID NO: 1463 - RNA, 30 nt, Artificial Sequence
  Synthetic Construct
ccguuugugcucgauaaaaauaagaauguc

SEQ ID NO: 1464 - RNA, 30 nt, Artificial Sequence
  Synthetic Construct
uucuaagcagaggcugccauugcauuguuu

SEQ ID NO: 1465 - RNA, 30 nt, Artificial Sequence
  Synthetic Construct
cguuugugcucgauaaaaauaagaaugucc

SEQ ID NO: 1466 - RNA, 30 nt, Artificial Sequence
  Synthetic Construct
ugcucgauaaaaauaagaaugucccccaau

SEQ ID NO: 1467 - RNA, 30 nt, Artificial Sequence
  Synthetic Construct
aucuggcacugcccacaggugaggagguca

SEQ ID NO: 1468 - RNA, 30 nt, Artificial Sequence
  Synthetic Construct
aucaucuguaagaauggcuucaagaggcuc

SEQ ID NO: 1469 - RNA, 30 nt, Artificial Sequence
  Synthetic Construct
aagaggcucggcugugguuggagaaacaaa

SEQ ID NO: 1470 - RNA, 30 nt, Artificial Sequence
  Synthetic Construct
gagaaacaaaagcacaauuauuagagugcc

SEQ ID NO: 1471 - RNA, 30 nt, Artificial Sequence
  Synthetic Construct
uuagagugccagagaggacagaaaggggag

SEQ ID NO: 1472 - RNA, 30 nt, Artificial Sequence
  Synthetic Construct
gugcucgauaaaaauaagaaugucccccaa

SEQ ID NO: 1473 - RNA, 30 nt, Artificial Sequence
  Synthetic Construct
uccacagcuuuuucuaagcagaggcugcca

SEQ ID NO: 1474 - RNA, 30 nt, Artificial Sequence
  Synthetic Construct
gugaaggggaagguggcuuauccacagcuu

SEQ ID NO: 1475 - RNA, 30 nt, Artificial Sequence
  Synthetic Construct
aucucgauuggugaaggggaagguggcuua

SEQ ID NO: 1476 - RNA, 30 nt, Artificial Sequence
  Synthetic Construct
uccuugcuucucauuuaccugcuauguguu

SEQ ID NO: 1477 - RNA, 30 nt, Artificial Sequence
  Synthetic Construct
cuucucauuuaccugcuauguguuccuguu

SEQ ID NO: 1478 - RNA, 30 nt, Artificial Sequence
  Synthetic Construct
ucauuuaccugcuauguguuccuguuuggg

SEQ ID NO: 1479 - RNA, 30 nt, Artificial Sequence
  Synthetic Construct
accugcuauguguuccuguuuggggcaaau

SEQ ID NO: 1480 - RNA, 30 nt, Artificial Sequence
  Synthetic Construct
ccugcuauguguuccuguuuggggcaaauu

SEQ ID NO: 1481 - RNA, 30 nt, Artificial Sequence
  Synthetic Construct
cuguuuggggcaaauuccucuagaugacgu

SEQ ID NO: 1482 - RNA, 30 nt, Artificial Sequence
  Synthetic Construct
ggggcaaauuccucuagaugacguugauaa

SEQ ID NO: 1483 - RNA, 30 nt, Artificial Sequence
  Synthetic Construct
gggcaaauuccucuagaugacguugauaaa

SEQ ID NO: 1484 - RNA, 30 nt, Artificial Sequence
  Synthetic Construct
cucuagaugacguugauaaacaaucgucau

SEQ ID NO: 1485 - RNA, 30 nt, Artificial Sequence
  Synthetic Construct
auaaacaaucgucauccucuggcgugaccu

SEQ ID NO: 1486 - RNA, 30 nt, Artificial Sequence
  Synthetic Construct
gaugcuuuuuucaucucgauuggugaaggg

SEQ ID NO: 1487 - RNA, 30 nt, Artificial Sequence
  Synthetic Construct
uuucaucucgauuggugaaggggaaggugg

SEQ ID NO: 1488 - RNA, 30 nt, Artificial Sequence
  Synthetic Construct
uucaucucgauuggugaaggggaagguggc

SEQ ID NO: 1489 - RNA, 30 nt, Artificial Sequence
  Synthetic Construct
ucaucucgauuggugaaggggaagguggcu

SEQ ID NO: 1490 - RNA, 30 nt, Artificial Sequence
  Synthetic Construct
caucucgauuggugaaggggaagguggcuu

SEQ ID NO: 1491 - RNA, 30 nt, Artificial Sequence
  Synthetic Construct
ccccaaacaggaacacauagcagguaaaug

SEQ ID NO: 1492 - RNA, 30 nt, Artificial Sequence
  Synthetic Construct
uggagcucccaacgggccguggucugguuc

SEQ ID NO: 1493 - RNA, 30 nt, Artificial Sequence
  Synthetic Construct
uuuguagcuguagugcuugauuuuggguuu

SEQ ID NO: 1494 - RNA, 30 nt, Artificial Sequence
  Synthetic Construct
ucugugaaagaaacccaaaaucaagcacua

SEQ ID NO: 1495 - RNA, 30 nt, Artificial Sequence
  Synthetic Construct
guagcuguagugcuugauuuuggguuucuu

SEQ ID NO: 1496 - RNA, 30 nt, Artificial Sequence
  Synthetic Construct
uagcuguagugcuugauuuuggguuucuuu

SEQ ID NO: 1497 - RNA, 30 nt, Artificial Sequence
  Synthetic Construct
auuuuggguuucuuucacagauaaacuucu

SEQ ID NO: 1498 - RNA, 30 nt, Artificial Sequence
  Synthetic Construct
uggguuucuuucacagauaaacuucugcac

SEQ ID NO: 1499 - RNA, 30 nt, Artificial Sequence
  Synthetic Construct
ggguuucuuucacagauaaacuucugcacu

SEQ ID NO: 1500 - RNA, 30 nt, Artificial Sequence
  Synthetic Construct
cuuucacagauaaacuucugcacuggaggg

SEQ ID NO: 1501 - RNA, 30 nt, Artificial Sequence
  Synthetic Construct
uuucacagauaaacuucugcacuggagggg

SEQ ID NO: 1502 - RNA, 30 nt, Artificial Sequence
  Synthetic Construct
cacagauaaacuucugcacuggaggggccu

SEQ ID NO: 1503 - RNA, 30 nt, Artificial Sequence
  Synthetic Construct
acagauaaacuucugcacuggaggggccuc

SEQ ID NO: 1504 - RNA, 30 nt, Artificial Sequence
  Synthetic Construct
ugcacuggaggggccucuccuccccucguu

SEQ ID NO: 1505 - RNA, 30 nt, Artificial Sequence
  Synthetic Construct
ugcacauggagcucuaauccccacgccugg

SEQ ID NO: 1506 - RNA, 30 nt, Artificial Sequence
  Synthetic Construct
guaaguugagccuuauuucuucuacaaaug

SEQ ID NO: 1507 - RNA, 30 nt, Artificial Sequence
  Synthetic Construct
gguuucuuucacagauaaacuucugcacug

SEQ ID NO: 1508 - RNA, 30 nt, Artificial Sequence
  Synthetic Construct
agccuuauuucuucuacaaauguccaugug

SEQ ID NO: 1509 - RNA, 30 nt, Artificial Sequence
  Synthetic Construct
uaaguugagccuuauuucuucuacaaaugu

SEQ ID NO: 1510 - RNA, 30 nt, Artificial Sequence
  Synthetic Construct
aucugugaaagaaacccaaaaucaagcacu

SEQ ID NO: 1511 - RNA, 30 nt, Artificial Sequence
  Synthetic Construct
gagcuccaugugcagaacgaggggaggaga

SEQ ID NO: 1512 - RNA, 30 nt, Artificial Sequence
  Synthetic Construct
ugcacucaucccaggcguggggauuagagc

SEQ ID NO: 1513 - RNA, 30 nt, Artificial Sequence
  Synthetic Construct
uagaagaaauaaggcucaacuuacaaauac

SEQ ID NO: 1514 - RNA, 30 nt, Artificial Sequence
  Synthetic Construct
caaauacccugcggggcauauucugcacuc

SEQ ID NO: 1515 - RNA, 30 nt, Artificial Sequence
  Synthetic Construct
guagaagaaauaaggcucaacuuacaaaua

SEQ ID NO: 1516 - RNA, 30 nt, Artificial Sequence
  Synthetic Construct
uacaaauguccauguguauagagaugagaa

SEQ ID NO: 1517 - RNA, 30 nt, Artificial Sequence
  Synthetic Construct
uucuacaaauguccauguguauagagauga

SEQ ID NO: 1518 - RNA, 30 nt, Artificial Sequence
  Synthetic Construct
cuucuacaaauguccauguguauagagaug

SEQ ID NO: 1519 - RNA, 30 nt, Artificial Sequence
  Synthetic Construct
uuucuucuacaaauguccauguguauagag

SEQ ID NO: 1520 - RNA, 30 nt, Artificial Sequence
  Synthetic Construct
uuuaaaaaaaauuuuucuuaacauuuauau

SEQ ID NO: 1521 - RNA, 30 nt, Artificial Sequence
  Synthetic Construct
aaaaaaaauuuuucuuaacauuuauauuua

SEQ ID NO: 1522 - RNA, 30 nt, Artificial Sequence
  Synthetic Construct
uaaaaaaaauuuuucuuaacauuuauauuu

SEQ ID NO: 1523 - RNA, 30 nt, Artificial Sequence
  Synthetic Construct
uuaaaaaaaauuuuucuuaacauuuauauu

SEQ ID NO: 1524 - RNA, 30 nt, Artificial Sequence
  Synthetic Construct
aaaaaaauuuuucuuaacauuuauauuuaa

SEQ ID NO: 1525 - RNA, 30 nt, Artificial Sequence
  Synthetic Construct
cccccuaaacauaaugaaguguuuuuuaaa

SEQ ID NO: 1526 - RNA, 30 nt, Artificial Sequence
  Synthetic Construct
cacuaccauuuuuaaauggauaacaagucu

SEQ ID NO: 1527 - RNA, 30 nt, Artificial Sequence
  Synthetic Construct
aauggauaacaagucuuguaacaccaccaa

SEQ ID NO: 1528 - RNA, 30 nt, Artificial Sequence
  Synthetic Construct
aaauggauaacaagucuuguaacaccacca

SEQ ID NO: 1529 - RNA, 30 nt, Artificial Sequence
  Synthetic Construct
uaaauggauaacaagucuuguaacaccacc

SEQ ID NO: 1530 - RNA, 30 nt, Artificial Sequence
  Synthetic Construct
uuaaauggauaacaagucuuguaacaccac

SEQ ID NO: 1531 - RNA, 30 nt, Artificial Sequence
  Synthetic Construct
ccacuaccauuuuuaaauggauaacaaguc

SEQ ID NO: 1532 - RNA, 30 nt, Artificial Sequence
  Synthetic Construct
uucuuaacauuuauauuuaaaaaaguuuug

SEQ ID NO: 1533 - RNA, 30 nt, Artificial Sequence
  Synthetic Construct
uaacaccaccaagacaauggaacccuaaaa

SEQ ID NO: 1534 - RNA, 30 nt, Artificial Sequence
  Synthetic Construct
ucuuaacauuuauauuuaaaaaaguuuugu

SEQ ID NO: 1535 - RNA, 30 nt, Artificial Sequence
  Synthetic Construct
cuauguuaaguguauucuguuuccauucac

SEQ ID NO: 1536 - RNA, 30 nt, Artificial Sequence
  Synthetic Construct
uuaacauuuauauuuaaaaaaguuuuguac

SEQ ID NO: 1537 - RNA, 30 nt, Artificial Sequence
  Synthetic Construct
acauuuauauuuaaaaaaguuuuguacaaa

SEQ ID NO: 1538 - RNA, 30 nt, Artificial Sequence
  Synthetic Construct
auauuuaaaaaaguuuuguacaaaaaaauc

SEQ ID NO: 1539 - RNA, 30 nt, Artificial Sequence
  Synthetic Construct
uauuuaaaaaaguuuuguacaaaaaaaucc

SEQ ID NO: 1540 - RNA, 30 nt, Artificial Sequence
  Synthetic Construct
aaaaaaguuuuguacaaaaaaauccuugca

SEQ ID NO: 1541 - RNA, 30 nt, Artificial Sequence
  Synthetic Construct
aaaaaguuuuguacaaaaaaauccuugcac

SEQ ID NO: 1542 - RNA, 30 nt, Artificial Sequence
  Synthetic Construct
uguacaaaaaaauccuugcacuguagaagc

SEQ ID NO: 1543 - RNA, 30 nt, Artificial Sequence
  Synthetic Construct
guacaaaaaaauccuugcacuguagaagcg

SEQ ID NO: 1544 - RNA, 30 nt, Artificial Sequence
  Synthetic Construct
uacaaaaaaauccuugcacuguagaagcga

SEQ ID NO: 1545 - RNA, 30 nt, Artificial Sequence
  Synthetic Construct
cacuguagaagcgaaagcaaucauucauuu

SEQ ID NO: 1546 - RNA, 30 nt, Artificial Sequence
  Synthetic Construct
auuucuauguuaaguguauucuguuuccau

SEQ ID NO: 1547 - RNA, 30 nt, Artificial Sequence
  Synthetic Construct
caaccugaagagcgguguguauccaaggca

SEQ ID NO: 1548 - RNA, 30 nt, Artificial Sequence
  Synthetic Construct
uauguuaaguguauucuguuuccauucaca

SEQ ID NO: 1549 - RNA, 30 nt, Artificial Sequence
  Synthetic Construct
aguguauucuguuuccauucacagcgcuug

SEQ ID NO: 1550 - RNA, 30 nt, Artificial Sequence
  Synthetic Construct
cuuaacauuuauauuuaaaaaaguuuugua

SEQ ID NO: 1551 - RNA, 30 nt, Artificial Sequence
  Synthetic Construct
acaaccugaagagcgguguguauccaaggc

SEQ ID NO: 1552 - RNA, 30 nt, Artificial Sequence
  Synthetic Construct
aguacuauauaaucuuaaaccuuuccccaa

SEQ ID NO: 1553 - RNA, 30 nt, Artificial Sequence
  Synthetic Construct
uuacaaccugaagagcgguguguauccaag

SEQ ID NO: 1554 - RNA, 30 nt, Artificial Sequence
  Synthetic Construct
uccacuaccaaaaaagguacauugauaccu

SEQ ID NO: 1555 - RNA, 30 nt, Artificial Sequence
  Synthetic Construct
ccacuaccaaaaaagguacauugauaccuu

SEQ ID NO: 1556 - RNA, 30 nt, Artificial Sequence
  Synthetic Construct
cacuaccaaaaaagguacauugauaccuuu

SEQ ID NO: 1557 - RNA, 30 nt, Artificial Sequence
  Synthetic Construct
auaccuuuuaagagaacaagcaacaguuaa

SEQ ID NO: 1558 - RNA, 30 nt, Artificial Sequence
  Synthetic Construct
uaagagaacaagcaacaguuaaaaauacaa

SEQ ID NO: 1559 - RNA, 30 nt, Artificial Sequence
  Synthetic Construct
aagagaacaagcaacaguuaaaaauacaag

SEQ ID NO: 1560 - RNA, 30 nt, Artificial Sequence
  Synthetic Construct
agagaacaagcaacaguuaaaaauacaagc

SEQ ID NO: 1561 - RNA, 30 nt, Artificial Sequence
  Synthetic Construct
aaaauacaagcuucaauauaaauacuauag

SEQ ID NO: 1562 - RNA, 30 nt, Artificial Sequence
  Synthetic Construct
aauauaaauacuauagugccuaacacuaga

SEQ ID NO: 1563 - RNA, 30 nt, Artificial Sequence
  Synthetic Construct
aauucaaauaccauucuagaaauacagaaa

SEQ ID NO: 1564 - RNA, 30 nt, Artificial Sequence
  Synthetic Construct
auucaaauaccauucuagaaauacagaaaa

SEQ ID NO: 1565 - RNA, 30 nt, Artificial Sequence
  Synthetic Construct
aaauaccauucuagaaauacagaaaaaaga

SEQ ID NO: 1566 - RNA, 30 nt, Artificial Sequence
  Synthetic Construct
uagaaauacagaaaaaagaccauaaaugua

SEQ ID NO: 1567 - RNA, 30 nt, Artificial Sequence
  Synthetic Construct
uagcauaggaaucaacaugagugugcauuu

SEQ ID NO: 1568 - RNA, 30 nt, Artificial Sequence
  Synthetic Construct
agcauaggaaucaacaugagugugcauuuu

SEQ ID NO: 1569 - RNA, 30 nt, Artificial Sequence
  Synthetic Construct
gcauaggaaucaacaugagugugcauuuuc

SEQ ID NO: 1570 - RNA, 30 nt, Artificial Sequence
  Synthetic Construct
uccuauauuuaaguacuauauaaucuuaaa

SEQ ID NO: 1571 - RNA, 30 nt, Artificial Sequence
  Synthetic Construct
uuuacaaccugaagagcgguguguauccaa

SEQ ID NO: 1572 - RNA, 30 nt, Artificial Sequence
  Synthetic Construct
uuuuacaaccugaagagcgguguguaucca

SEQ ID NO: 1573 - RNA, 30 nt, Artificial Sequence
  Synthetic Construct
uuuuuacaaccugaagagcgguguguaucc

SEQ ID NO: 1574 - RNA, 30 nt, Artificial Sequence
  Synthetic Construct
uuuuuuacaaccugaagagcgguguguauc

SEQ ID NO: 1575 - RNA, 30 nt, Artificial Sequence
  Synthetic Construct
uuuuuuuacaaccugaagagcgguguguau

SEQ ID NO: 1576 - RNA, 30 nt, Artificial Sequence
  Synthetic Construct
uuuuuuuuacaaccugaagagcggugugua

SEQ ID NO: 1577 - RNA, 30 nt, Artificial Sequence
  Synthetic Construct
uacaaccugaagagcgguguguauccaagg

SEQ ID NO: 1578 - RNA, 30 nt, Artificial Sequence
  Synthetic Construct
uuuuuuuuuacaaccugaagagcggugugu

SEQ ID NO: 1579 - RNA, 30 nt, Artificial Sequence
  Synthetic Construct
ccccaauguauguuuuuuuuuuuuacaacc

SEQ ID NO: 1580 - RNA, 30 nt, Artificial Sequence
  Synthetic Construct
aaccuuuccccaauguauguuuuuuuuuuu

SEQ ID NO: 1581 - RNA, 30 nt, Artificial Sequence
  Synthetic Construct
uguuuccauucacagcgcuugcaauguugc

SEQ ID NO: 1582 - RNA, 30 nt, Artificial Sequence
  Synthetic Construct
aaguacuauauaaucuuaaaccuuucccca

SEQ ID NO: 1583 - RNA, 30 nt, Artificial Sequence
  Synthetic Construct
cuauauuuaaguacuauauaaucuuaaacc

SEQ ID NO: 1584 - RNA, 30 nt, Artificial Sequence
  Synthetic Construct
ccuauauuuaaguacuauauaaucuuaaac

SEQ ID NO: 1585 - RNA, 30 nt, Artificial Sequence
  Synthetic Construct
cccaauguauguuuuuuuuuuuuacaaccu

SEQ ID NO: 1586 - RNA, 30 nt, Artificial Sequence
  Synthetic Construct
ccauucacagcgcuugcaauguugcgucca

SEQ ID NO: 1587 - RNA, 30 nt, Artificial Sequence
  Synthetic Construct
uuaguuuuuaaaaaaugcuccucaaugaga

SEQ ID NO: 1588 - RNA, 30 nt, Artificial Sequence
  Synthetic Construct
acagcgcuugcaauguugcguccaaguaag

SEQ ID NO: 1589 - RNA, 30 nt, Artificial Sequence
  Synthetic Construct
uccuaucugagcagguuuauuuuauacuca

SEQ ID NO: 1590 - RNA, 30 nt, Artificial Sequence
  Synthetic Construct
auuuuauacucaaccucuguaucucugauu

SEQ ID NO: 1591 - RNA, 30 nt, Artificial Sequence
  Synthetic Construct
uuuuauacucaaccucuguaucucugauua

SEQ ID NO: 1592 - RNA, 30 nt, Artificial Sequence
  Synthetic Construct
uauacucaaccucuguaucucugauuagag

SEQ ID NO: 1593 - RNA, 30 nt, Artificial Sequence
  Synthetic Construct
auacucaaccucuguaucucugauuagaga

SEQ ID NO: 1594 - RNA, 30 nt, Artificial Sequence
  Synthetic Construct
uacucaaccucuguaucucugauuagagaa

SEQ ID NO: 1595 - RNA, 30 nt, Artificial Sequence
  Synthetic Construct
gagaaaagauacagauaucacaggcagagu

SEQ ID NO: 1596 - RNA, 30 nt, Artificial Sequence
  Synthetic Construct
gaacaccaacuggggcagaugcuagcuuaa

SEQ ID NO: 1597 - RNA, 30 nt, Artificial Sequence
  Synthetic Construct
aacaccaacuggggcagaugcuagcuuaau

SEQ ID NO: 1598 - RNA, 30 nt, Artificial Sequence
  Synthetic Construct
auaaaaaagaaaaaauuaaaaaaauaaaaa

SEQ ID NO: 1599 - RNA, 30 nt, Artificial Sequence
  Synthetic Construct
aaaaaauaaaaauaaaaacaaugaauccuc

SEQ ID NO: 1600 - RNA, 30 nt, Artificial Sequence
  Synthetic Construct
cauguuaacacaaauagcacacaguguaug

SEQ ID NO: 1601 - RNA, 30 nt, Artificial Sequence
  Synthetic Construct
acacaaauagcacacaguguauggaaaaga

SEQ ID NO: 1602 - RNA, 30 nt, Artificial Sequence
  Synthetic Construct
uagggagcacagacauauauacugcuacuc

SEQ ID NO: 1603 - RNA, 30 nt, Artificial Sequence
  Synthetic Construct
agggagcacagacauauauacugcuacucu

SEQ ID NO: 1604 - RNA, 30 nt, Artificial Sequence
  Synthetic Construct
gggagcacagacauauauacugcuacucuu

SEQ ID NO: 1605 - RNA, 30 nt, Artificial Sequence
  Synthetic Construct
aaauucuuucucuucuuuuuuuaagaaugu

SEQ ID NO: 1606 - RNA, 30 nt, Artificial Sequence
  Synthetic Construct
auaguuaaucaucauuguaucaauauuagc

SEQ ID NO: 1607 - RNA, 30 nt, Artificial Sequence
  Synthetic Construct
agaauucauaguuaaucaucauuguaucaa

SEQ ID NO: 1608 - RNA, 30 nt, Artificial Sequence
  Synthetic Construct
aaugcaagucuuaagaauucauaguuaauc

SEQ ID NO: 1609 - RNA, 30 nt, Artificial Sequence
  Synthetic Construct
aaaugcaagucuuaagaauucauaguuaau

SEQ ID NO: 1610 - RNA, 30 nt, Artificial Sequence
  Synthetic Construct
agaaugucacauuuaaaugcaagucuuaag

SEQ ID NO: 1611 - RNA, 30 nt, Artificial Sequence
  Synthetic Construct
aagaaugucacauuuaaaugcaagucuuaa

SEQ ID NO: 1612 - RNA, 30 nt, Artificial Sequence
  Synthetic Construct
auuguccuaucugagcagguuuauuuuaua

SEQ ID NO: 1613 - RNA, 30 nt, Artificial Sequence
  Synthetic Construct
uaagaaugucacauuuaaaugcaagucuua

SEQ ID NO: 1614 - RNA, 30 nt, Artificial Sequence
  Synthetic Construct
uuuaagaaugucacauuuaaaugcaagucu

SEQ ID NO: 1615 - RNA, 30 nt, Artificial Sequence
  Synthetic Construct
uuuuaagaaugucacauuuaaaugcaaguc

SEQ ID NO: 1616 - RNA, 30 nt, Artificial Sequence
  Synthetic Construct
uuuuuuuaagaaugucacauuuaaaugcaa

SEQ ID NO: 1617 - RNA, 30 nt, Artificial Sequence
  Synthetic Construct
ucuucuuuuuuuaagaaugucacauuuaaa

SEQ ID NO: 1618 - RNA, 30 nt, Artificial Sequence
  Synthetic Construct
cucuucuuuuuuuaagaaugucacauuuaa

SEQ ID NO: 1619 - RNA, 30 nt, Artificial Sequence
  Synthetic Construct
uuucucuucuuuuuuuaagaaugucacauu

SEQ ID NO: 1620 - RNA, 30 nt, Artificial Sequence
  Synthetic Construct
uuaagaaugucacauuuaaaugcaagucuu

SEQ ID NO: 1621 - RNA, 30 nt, Artificial Sequence
  Synthetic Construct
cauucacagcgcuugcaauguugcguccaa

SEQ ID NO: 1622 - RNA, 30 nt, Artificial Sequence
  Synthetic Construct
uacagugcacuuaauuguccuaucugagca

SEQ ID NO: 1623 - RNA, 30 nt, Artificial Sequence
  Synthetic Construct
ccuuaaguauagaccuguaaacugggaaaa

SEQ ID NO: 1624 - RNA, 30 nt, Artificial Sequence
  Synthetic Construct
caauguugcguccaaguaaguaagcucaau

SEQ ID NO: 1625 - RNA, 30 nt, Artificial Sequence
  Synthetic Construct
cguccaaguaaguaagcucaauagucaagu

SEQ ID NO: 1626 - RNA, 30 nt, Artificial Sequence
  Synthetic Construct
uuuuuuuuuuaguuuuuaaaaaaugcuccu

SEQ ID NO: 1627 - RNA, 30 nt, Artificial Sequence
  Synthetic Construct
uuuuuuuuuaguuuuuaaaaaaugcuccuc

SEQ ID NO: 1628 - RNA, 30 nt, Artificial Sequence
  Synthetic Construct
uuuuuuuuaguuuuuaaaaaaugcuccuca

SEQ ID NO: 1629 - RNA, 30 nt, Artificial Sequence
  Synthetic Construct
uuuuuuuaguuuuuaaaaaaugcuccucaa

SEQ ID NO: 1630 - RNA, 30 nt, Artificial Sequence
  Synthetic Construct
uuuuuuaguuuuuaaaaaaugcuccucaau

SEQ ID NO: 1631 - RNA, 30 nt, Artificial Sequence
  Synthetic Construct
uuuuuaguuuuuaaaaaaugcuccucaaug

SEQ ID NO: 1632 - RNA, 30 nt, Artificial Sequence
  Synthetic Construct
uuuuaguuuuuaaaaaaugcuccucaauga

SEQ ID NO: 1633 - RNA, 30 nt, Artificial Sequence
  Synthetic Construct
uuuaguuuuuaaaaaaugcuccucaaugag

SEQ ID NO: 1634 - RNA, 30 nt, Artificial Sequence
  Synthetic Construct
uuccacuaccaaaaaagguacauugauacc

SEQ ID NO: 1635 - RNA, 30 nt, Artificial Sequence
  Synthetic Construct
uaguuuuuaaaaaaugcuccucaaugagau

SEQ ID NO: 1636 - RNA, 30 nt, Artificial Sequence
  Synthetic Construct
aguuuuuaaaaaaugcuccucaaugagauu

SEQ ID NO: 1637 - RNA, 30 nt, Artificial Sequence
  Synthetic Construct
guuuuuaaaaaaugcuccucaaugagauug

SEQ ID NO: 1638 - RNA, 30 nt, Artificial Sequence
  Synthetic Construct
uuaaaaaaugcuccucaaugagauuguguu

SEQ ID NO: 1639 - RNA, 30 nt, Artificial Sequence
  Synthetic Construct
uaaaaaaugcuccucaaugagauuguguuc

SEQ ID NO: 1640 - RNA, 30 nt, Artificial Sequence
  Synthetic Construct
aaaaaaugcuccucaaugagauuguguuca

SEQ ID NO: 1641 - RNA, 30 nt, Artificial Sequence
  Synthetic Construct
cccuuaaguauagaccuguaaacugggaaa

SEQ ID NO: 1642 - RNA, 30 nt, Artificial Sequence
  Synthetic Construct
ucccuuaaguauagaccuguaaacugggaa

SEQ ID NO: 1643 - RNA, 30 nt, Artificial Sequence
  Synthetic Construct
caacuuuucccuuaaguauagaccuguaaa

SEQ ID NO: 1644 - RNA, 30 nt, Artificial Sequence
  Synthetic Construct
uugcaacuuuucccuuaaguauagaccugu

SEQ ID NO: 1645 - RNA, 30 nt, Artificial Sequence
  Synthetic Construct
agcauucuugcaacuuuucccuuaaguaua

SEQ ID NO: 1646 - RNA, 30 nt, Artificial Sequence
  Synthetic Construct
cagcauucuugcaacuuuucccuuaaguau

SEQ ID NO: 1647 - RNA, 30 nt, Artificial Sequence
  Synthetic Construct
aguauagaccuguaaacugggaaaauugua

SEQ ID NO: 1648 - RNA, 30 nt, Artificial Sequence
  Synthetic Construct
ucagcauucuugcaacuuuucccuuaagua

SEQ ID NO: 1649 - RNA, 30 nt, Artificial Sequence
  Synthetic Construct
uuucagcauucuugcaacuuuucccuuaag

SEQ ID NO: 1650 - RNA, 30 nt, Artificial Sequence
  Synthetic Construct
uuuucagcauucuugcaacuuuucccuuaa

SEQ ID NO: 1651 - RNA, 30 nt, Artificial Sequence
  Synthetic Construct
uuuuucagcauucuugcaacuuuucccuua

SEQ ID NO: 1652 - RNA, 30 nt, Artificial Sequence
  Synthetic Construct
aauuuuuuuucagcauucuugcaacuuuuc

SEQ ID NO: 1653 - RNA, 30 nt, Artificial Sequence
  Synthetic Construct
uguucaauuuuuuuucagcauucuugcaac

SEQ ID NO: 1654 - RNA, 30 nt, Artificial Sequence
  Synthetic Construct
aaaaaugcuccucaaugagauuguguucaa

SEQ ID NO: 1655 - RNA, 30 nt, Artificial Sequence
  Synthetic Construct
uucagcauucuugcaacuuuucccuuaagu

SEQ ID NO: 1656 - RNA, 30 nt, Artificial Sequence
  Synthetic Construct
uuuccacuaccaaaaaagguacauugauac

SEQ ID NO: 1657 - RNA, 30 nt, Artificial Sequence
  Synthetic Construct
caauagaacuuaacaaagaccagaaacaaa

SEQ ID NO: 1658 - RNA, 30 nt, Artificial Sequence
  Synthetic Construct
uuuuuccacuaccaaaaaagguacauugau

SEQ ID NO: 1659 - RNA, 30 nt, Artificial Sequence
  Synthetic Construct
uuccaauagaacuuaacaaagaccagaaac

SEQ ID NO: 1660 - RNA, 30 nt, Artificial Sequence
  Synthetic Construct
uccaauagaacuuaacaaagaccagaaaca

SEQ ID NO: 1661 - RNA, 30 nt, Artificial Sequence
  Synthetic Construct
ccaauagaacuuaacaaagaccagaaacaa

SEQ ID NO: 1662 - RNA, 30 nt, Artificial Sequence
  Synthetic Construct
aucaucauuguaucaauauuagcuuauaua

SEQ ID NO: 1663 - RNA, 30 nt, Artificial Sequence
  Synthetic Construct
acaaagaccagaaacaaauacaauaaaaag

SEQ ID NO: 1664 - RNA, 30 nt, Artificial Sequence
  Synthetic Construct
uaaugaccuuuggucaucuaaauaaaaaaa

SEQ ID NO: 1665 - RNA, 30 nt, Artificial Sequence
  Synthetic Construct
ggucaucuaaauaaaaaaaaaaauaaaaac

SEQ ID NO: 1666 - RNA, 30 nt, Artificial Sequence
  Synthetic Construct
gucaucuaaauaaaaaaaaaaauaaaaaca

SEQ ID NO: 1667 - RNA, 30 nt, Artificial Sequence
  Synthetic Construct
agugccucuguuuugaacagggcacauaag

SEQ ID NO: 1668 - RNA, 30 nt, Artificial Sequence
  Synthetic Construct
ugaacagggcacauaagcaauaauaaauag

SEQ ID NO: 1669 - RNA, 30 nt, Artificial Sequence
  Synthetic Construct
gaacagggcacauaagcaauaauaaauagu

SEQ ID NO: 1670 - RNA, 30 nt, Artificial Sequence
  Synthetic Construct
aacagggcacauaagcaauaauaaauagug

SEQ ID NO: 1671 - RNA, 30 nt, Artificial Sequence
  Synthetic Construct
caaguuacgacaaacagcuuucauuacagg

SEQ ID NO: 1672 - RNA, 30 nt, Artificial Sequence
  Synthetic Construct
aaguuacgacaaacagcuuucauuacagga

SEQ ID NO: 1673 - RNA, 30 nt, Artificial Sequence
  Synthetic Construct
augcagacaacugccaaaaaaacacagaca

SEQ ID NO: 1674 - RNA, 30 nt, Artificial Sequence
  Synthetic Construct
cgacaaacagcuuucauuacaggaauagaa

SEQ ID NO: 1675 - RNA, 30 nt, Artificial Sequence
  Synthetic Construct
auuacaggaauagaaaaggccaauaacaaa

SEQ ID NO: 1676 - RNA, 30 nt, Artificial Sequence
  Synthetic Construct
caggaauagaaaaggccaauaacaaaauau

SEQ ID NO: 1677 - RNA, 30 nt, Artificial Sequence
  Synthetic Construct
ugcauugccauuuacaaaaaaguauugacu

SEQ ID NO: 1678 - RNA, 30 nt, Artificial Sequence
  Synthetic Construct
ccauuuacaaaaaaguauugacuaaagcgg

SEQ ID NO: 1679 - RNA, 30 nt, Artificial Sequence
  Synthetic Construct
acaaaaaaguauugacuaaagcgggcuuuc

SEQ ID NO: 1680 - RNA, 30 nt, Artificial Sequence
  Synthetic Construct
caaaaaaguauugacuaaagcgggcuuucu

SEQ ID NO: 1681 - RNA, 30 nt, Artificial Sequence
  Synthetic Construct
acuaaagcgggcuuucucuuuaauaugcuu

SEQ ID NO: 1682 - RNA, 30 nt, Artificial Sequence
  Synthetic Construct
cucuuuaauaugcuuugcauaugaaauucu

SEQ ID NO: 1683 - RNA, 30 nt, Artificial Sequence
  Synthetic Construct
ucuuuaauaugcuuugcauaugaaauucuu

SEQ ID NO: 1684 - RNA, 30 nt, Artificial Sequence
  Synthetic Construct
aauaugcuuugcauaugaaauucuuuccaa

SEQ ID NO: 1685 - RNA, 30 nt, Artificial Sequence
  Synthetic Construct
auaugcuuugcauaugaaauucuuuccaau

SEQ ID NO: 1686 - RNA, 30 nt, Artificial Sequence
  Synthetic Construct
gcauaugaaauucuuuccaaucuaaauaua

SEQ ID NO: 1687 - RNA, 30 nt, Artificial Sequence
  Synthetic Construct
cauaugaaauucuuuccaaucuaaauauaa

SEQ ID NO: 1688 - RNA, 30 nt, Artificial Sequence
  Synthetic Construct
uuuccaaucuaaauauaaagcaccauuuag

SEQ ID NO: 1689 - RNA, 30 nt, Artificial Sequence
  Synthetic Construct
cauuacaggaauagaaaaggccaauaacaa

SEQ ID NO: 1690 - RNA, 30 nt, Artificial Sequence
  Synthetic Construct
aauaaagggacaaaauggguguaugaacag

SEQ ID NO: 1691 - RNA, 30 nt, Artificial Sequence
  Synthetic Construct
caauaaagggacaaaauggguguaugaaca

SEQ ID NO: 1692 - RNA, 30 nt, Artificial Sequence
  Synthetic Construct
ucaauaaagggacaaaauggguguaugaac

SEQ ID NO: 1693 - RNA, 30 nt, Artificial Sequence
  Synthetic Construct
ggcaguugucugcauuaaccuguucauaca

SEQ ID NO: 1694 - RNA, 30 nt, Artificial Sequence
  Synthetic Construct
gcaguugucugcauuaaccuguucauacac

SEQ ID NO: 1695 - RNA, 30 nt, Artificial Sequence
  Synthetic Construct
ucugcauuaaccuguucauacacccauuuu

SEQ ID NO: 1696 - RNA, 30 nt, Artificial Sequence
  Synthetic Construct
accuguucauacacccauuuugucccuuua

SEQ ID NO: 1697 - RNA, 30 nt, Artificial Sequence
  Synthetic Construct
auacacccauuuugucccuuuauugaaaaa

SEQ ID NO: 1698 - RNA, 30 nt, Artificial Sequence
  Synthetic Construct
ugucccuuuauugaaaaaauaaaaaaaauu

SEQ ID NO: 1699 - RNA, 30 nt, Artificial Sequence
  Synthetic Construct
gucccuuuauugaaaaaauaaaaaaaauua

SEQ ID NO: 1700 - RNA, 30 nt, Artificial Sequence
  Synthetic Construct
ucccuuuauugaaaaaauaaaaaaaauuaa

SEQ ID NO: 1701 - RNA, 30 nt, Artificial Sequence
  Synthetic Construct
auugaaaaaauaaaaaaaauuaaaguacac

SEQ ID NO: 1702 - RNA, 30 nt, Artificial Sequence
  Synthetic Construct
uugaaaaaauaaaaaaaauuaaaguacaca

SEQ ID NO: 1703 - RNA, 30 nt, Artificial Sequence
  Synthetic Construct
aaaaaauaaaaaaaauuaaaguacacauug

SEQ ID NO: 1704 - RNA, 30 nt, Artificial Sequence
  Synthetic Construct
aaguacacauuguaagcuucuuguguccuc

SEQ ID NO: 1705 - RNA, 30 nt, Artificial Sequence
  Synthetic Construct
uaagcuucuuguguccucauuugacacacu

SEQ ID NO: 1706 - RNA, 30 nt, Artificial Sequence
  Synthetic Construct
uuguguccucauuugacacacucuguaaau

SEQ ID NO: 1707 - RNA, 30 nt, Artificial Sequence
  Synthetic Construct
uguccucauuugacacacucuguaaauuac

SEQ ID NO: 1708 - RNA, 30 nt, Artificial Sequence
  Synthetic Construct
gacacacucuguaaauuacuugcaagaaaa

SEQ ID NO: 1709 - RNA, 30 nt, Artificial Sequence
  Synthetic Construct
acacacucuguaaauuacuugcaagaaaau

SEQ ID NO: 1710 - RNA, 30 nt, Artificial Sequence
  Synthetic Construct
uucaauaaagggacaaaauggguguaugaa

SEQ ID NO: 1711 - RNA, 30 nt, Artificial Sequence
  Synthetic Construct
uuucaauaaagggacaaaauggguguauga

SEQ ID NO: 1712 - RNA, 30 nt, Artificial Sequence
  Synthetic Construct
uuuuuucaauaaagggacaaaaugggugua

SEQ ID NO: 1713 - RNA, 30 nt, Artificial Sequence
  Synthetic Construct
auuuuuucaauaaagggacaaaaugggugu

SEQ ID NO: 1714 - RNA, 30 nt, Artificial Sequence
  Synthetic Construct
uauuuuuucaauaaagggacaaaaugggug

SEQ ID NO: 1715 - RNA, 30 nt, Artificial Sequence
  Synthetic Construct
uuauuuuuucaauaaagggacaaaaugggu

SEQ ID NO: 1716 - RNA, 30 nt, Artificial Sequence
  Synthetic Construct
ccaaucuaaauauaaagcaccauuuaguuu

SEQ ID NO: 1717 - RNA, 30 nt, Artificial Sequence
  Synthetic Construct
uuuauuuuuucaauaaagggacaaaauggg

SEQ ID NO: 1718 - RNA, 30 nt, Artificial Sequence
  Synthetic Construct
uuuuuauuuuuucaauaaagggacaaaaug

SEQ ID NO: 1719 - RNA, 30 nt, Artificial Sequence
  Synthetic Construct
auuuuuuuuauuuuuucaauaaagggacaa

SEQ ID NO: 1720 - RNA, 30 nt, Artificial Sequence
  Synthetic Construct
aauuuuuuuuauuuuuucaauaaagggaca

SEQ ID NO: 1721 - RNA, 30 nt, Artificial Sequence
  Synthetic Construct
caauguguacuuuaauuuuuuuuauuuuuu

SEQ ID NO: 1722 - RNA, 30 nt, Artificial Sequence
  Synthetic Construct
cagagugugucaaaugaggacacaagaagc

SEQ ID NO: 1723 - RNA, 30 nt, Artificial Sequence
  Synthetic Construct
acagagugugucaaaugaggacacaagaag

SEQ ID NO: 1724 - RNA, 30 nt, Artificial Sequence
  Synthetic Construct
uuuuauuuuuucaauaaagggacaaaaugg

SEQ ID NO: 1725 - RNA, 30 nt, Artificial Sequence
  Synthetic Construct
caaucuaaauauaaagcaccauuuaguuuu

SEQ ID NO: 1726 - RNA, 30 nt, Artificial Sequence
  Synthetic Construct
aguuuuuggcaaugaaaaaaacugcaaaac

SEQ ID NO: 1727 - RNA, 30 nt, Artificial Sequence
  Synthetic Construct
guuuuuggcaaugaaaaaaacugcaaaaca

SEQ ID NO: 1728 - RNA, 30 nt, Artificial Sequence
  Synthetic Construct
gcuugcaguacugcauacaguauggcagca

SEQ ID NO: 1729 - RNA, 30 nt, Artificial Sequence
  Synthetic Construct
caguacugcauacaguauggcagcaggaaa

SEQ ID NO: 1730 - RNA, 30 nt, Artificial Sequence
  Synthetic Construct
uagcaggcucccccaaaccgccauuauaug

SEQ ID NO: 1731 - RNA, 30 nt, Artificial Sequence
  Synthetic Construct
uauggcuucucaucuguaaugucacacuuu

SEQ ID NO: 1732 - RNA, 30 nt, Artificial Sequence
  Synthetic Construct
ucaucuguaaugucacacuuuuuuguuucu

SEQ ID NO: 1733 - RNA, 30 nt, Artificial Sequence
  Synthetic Construct
uuuguuucucucuuuuuuuuuuuuuugaag

SEQ ID NO: 1734 - RNA, 30 nt, Artificial Sequence
  Synthetic Construct
uuguuucucucuuuuuuuuuuuuuugaagc

SEQ ID NO: 1735 - RNA, 30 nt, Artificial Sequence
  Synthetic Construct
uguuucucucuuuuuuuuuuuuuugaagca

SEQ ID NO: 1736 - RNA, 30 nt, Artificial Sequence
  Synthetic Construct
guuucucucuuuuuuuuuuuuuugaagcau

SEQ ID NO: 1737 - RNA, 30 nt, Artificial Sequence
  Synthetic Construct
uuucucucuuuuuuuuuuuuuugaagcaua

SEQ ID NO: 1738 - RNA, 30 nt, Artificial Sequence
  Synthetic Construct
cucucuuuuuuuuuuuuuugaagcauacaa

SEQ ID NO: 1739 - RNA, 30 nt, Artificial Sequence
  Synthetic Construct
ucucuuuuuuuuuuuuuugaagcauacaaa

SEQ ID NO: 1740 - RNA, 30 nt, Artificial Sequence
  Synthetic Construct
uuuuuuuuuuugaagcauacaaauaauuug

SEQ ID NO: 1741 - RNA, 30 nt, Artificial Sequence
  Synthetic Construct
uuuuuuuuuugaagcauacaaauaauuugc

SEQ ID NO: 1742 - RNA, 30 nt, Artificial Sequence
  Synthetic Construct
uuuuuuuuugaagcauacaaauaauuugca

SEQ ID NO: 1743 - RNA, 30 nt, Artificial Sequence
  Synthetic Construct
uuuuuuuugaagcauacaaauaauuugcac

SEQ ID NO: 1744 - RNA, 30 nt, Artificial Sequence
  Synthetic Construct
uuuuuuugaagcauacaaauaauuugcacu

SEQ ID NO: 1745 - RNA, 30 nt, Artificial Sequence
  Synthetic Construct
uuuuuuccacuaccaaaaaagguacauuga

SEQ ID NO: 1746 - RNA, 30 nt, Artificial Sequence
  Synthetic Construct
uuuuuuuccacuaccaaaaaagguacauug

SEQ ID NO: 1747 - RNA, 30 nt, Artificial Sequence
  Synthetic Construct
aaaaaauauacuguggcagccugucuuuuu

SEQ ID NO: 1748 - RNA, 30 nt, Artificial Sequence
  Synthetic Construct
uccugccaaauuaaaaaaauauacuguggc

SEQ ID NO: 1749 - RNA, 30 nt, Artificial Sequence
  Synthetic Construct
cacuauauuauccugccaaauuaaaaaaau

SEQ ID NO: 1750 - RNA, 30 nt, Artificial Sequence
  Synthetic Construct
gcacuauauuauccugccaaauuaaaaaaa

SEQ ID NO: 1751 - RNA, 30 nt, Artificial Sequence
  Synthetic Construct
uuagcuugcaguacugcauacaguauggca

SEQ ID NO: 1752 - RNA, 30 nt, Artificial Sequence
  Synthetic Construct
aagcauacaaauaauuugcacuauauuauc

SEQ ID NO: 1753 - RNA, 30 nt, Artificial Sequence
  Synthetic Construct
ugaagcauacaaauaauuugcacuauauua

SEQ ID NO: 1754 - RNA, 30 nt, Artificial Sequence
  Synthetic Construct
uugaagcauacaaauaauuugcacuauauu

SEQ ID NO: 1755 - RNA, 30 nt, Artificial Sequence
  Synthetic Construct
uuugaagcauacaaauaauuugcacuauau

SEQ ID NO: 1756 - RNA, 30 nt, Artificial Sequence
  Synthetic Construct
uuuugaagcauacaaauaauuugcacuaua

SEQ ID NO: 1757 - RNA, 30 nt, Artificial Sequence
  Synthetic Construct
uuuuugaagcauacaaauaauuugcacuau

SEQ ID NO: 1758 - RNA, 30 nt, Artificial Sequence
  Synthetic Construct
uuuuuugaagcauacaaauaauuugcacua

SEQ ID NO: 1759 - RNA, 30 nt, Artificial Sequence
  Synthetic Construct
gaagcauacaaauaauuugcacuauauuau

SEQ ID NO: 1760 - RNA, 30 nt, Artificial Sequence
  Synthetic Construct
uuuuccacuaccaaaaaagguacauugaua

SEQ ID NO: 1761 - RNA, 30 nt, Artificial Sequence
  Synthetic Construct
cugcauaugaagguaagaugcuggaaugua

SEQ ID NO: 1762 - RNA, 30 nt, Artificial Sequence
  Synthetic Construct
uacugcauaugaagguaagaugcuggaaug

SEQ ID NO: 1763 - RNA, 30 nt, Artificial Sequence
  Synthetic Construct
uuggcaaugaaaaaaacugcaaaacauugg

SEQ ID NO: 1764 - RNA, 30 nt, Artificial Sequence
  Synthetic Construct
uggcaaugaaaaaaacugcaaaacauuggu

SEQ ID NO: 1765 - RNA, 30 nt, Artificial Sequence
  Synthetic Construct
ggcaaugaaaaaaacugcaaaacauugguu

SEQ ID NO: 1766 - RNA, 30 nt, Artificial Sequence
  Synthetic Construct
gcaaugaaaaaaacugcaaaacauugguuu

SEQ ID NO: 1767 - RNA, 30 nt, Artificial Sequence
  Synthetic Construct
guuuuuuuuuuuuuuuccuuuuuuuuucuu

SEQ ID NO: 1768 - RNA, 30 nt, Artificial Sequence
  Synthetic Construct
uuuuuuuuuuuuccuuuuuuuuucuuucuu

SEQ ID NO: 1769 - RNA, 30 nt, Artificial Sequence
  Synthetic Construct
uuuuuuuuuuuccuuuuuuuuucuuucuuu

SEQ ID NO: 1770 - RNA, 30 nt, Artificial Sequence
  Synthetic Construct
uuuuuuuuuuccuuuuuuuuucuuucuuuc

SEQ ID NO: 1771 - RNA, 30 nt, Artificial Sequence
  Synthetic Construct
uuuuuuuuuccuuuuuuuuucuuucuuucu

SEQ ID NO: 1772 - RNA, 30 nt, Artificial Sequence
  Synthetic Construct
uuuuuuuuccuuuuuuuuucuuucuuucuu

SEQ ID NO: 1773 - RNA, 30 nt, Artificial Sequence
  Synthetic Construct
uuuuuuuccuuuuuuuuucuuucuuucuuu

SEQ ID NO: 1774 - RNA, 30 nt, Artificial Sequence
  Synthetic Construct
uuuuuuccuuuuuuuuucuuucuuucuuuu

SEQ ID NO: 1775 - RNA, 30 nt, Artificial Sequence
  Synthetic Construct
uuuuuccuuuuuuuuucuuucuuucuuuua

SEQ ID NO: 1776 - RNA, 30 nt, Artificial Sequence
  Synthetic Construct
uuuuccuuuuuuuuucuuucuuucuuuuac

SEQ ID NO: 1777 - RNA, 30 nt, Artificial Sequence
  Synthetic Construct
uuuccuuuuuuuuucuuucuuucuuuuacu

SEQ ID NO: 1778 - RNA, 30 nt, Artificial Sequence
  Synthetic Construct
uuccuuuuuuuuucuuucuuucuuuuacug

SEQ ID NO: 1779 - RNA, 30 nt, Artificial Sequence
  Synthetic Construct
uccuuuuuuuuucuuucuuucuuuuacugc

SEQ ID NO: 1780 - RNA, 30 nt, Artificial Sequence
  Synthetic Construct
uuuuacugcauaugaagguaagaugcugga

SEQ ID NO: 1781 - RNA, 30 nt, Artificial Sequence
  Synthetic Construct
cuuuuacugcauaugaagguaagaugcugg

SEQ ID NO: 1782 - RNA, 30 nt, Artificial Sequence
  Synthetic Construct
uuucuuuuacugcauaugaagguaagaugc

SEQ ID NO: 1783 - RNA, 30 nt, Artificial Sequence
  Synthetic Construct
cuuucuuuuacugcauaugaagguaagaug

SEQ ID NO: 1784 - RNA, 30 nt, Artificial Sequence
  Synthetic Construct
uuucuuucuuuuacugcauaugaagguaag

SEQ ID NO: 1785 - RNA, 30 nt, Artificial Sequence
  Synthetic Construct
cuuucuuucuuuuacugcauaugaagguaa

SEQ ID NO: 1786 - RNA, 30 nt, Artificial Sequence
  Synthetic Construct
acugcauaugaagguaagaugcuggaaugu

SEQ ID NO: 1787 - RNA, 30 nt, Artificial Sequence
  Synthetic Construct
ucuuucuuucuuuuacugcauaugaaggua

SEQ ID NO: 1788 - RNA, 30 nt, Artificial Sequence
  Synthetic Construct
uuucuuucuuucuuuuacugcauaugaagg

SEQ ID NO: 1789 - RNA, 30 nt, Artificial Sequence
  Synthetic Construct
uuuucuuucuuucuuuuacugcauaugaag

SEQ ID NO: 1790 - RNA, 30 nt, Artificial Sequence
  Synthetic Construct
uuuuucuuucuuucuuuuacugcauaugaa

SEQ ID NO: 1791 - RNA, 30 nt, Artificial Sequence
  Synthetic Construct
uuuuuucuuucuuucuuuuacugcauauga

SEQ ID NO: 1792 - RNA, 30 nt, Artificial Sequence
  Synthetic Construct
cuuuuuuuuucuuucuuucuuuuacugcau

SEQ ID NO: 1793 - RNA, 30 nt, Artificial Sequence
  Synthetic Construct
ccuuuuuuuuucuuucuuucuuuuacugca

SEQ ID NO: 1794 - RNA, 30 nt, Artificial Sequence
  Synthetic Construct
uucuuucuuucuuuuacugcauaugaaggu

SEQ ID NO: 1795 - RNA, 30 nt, Artificial Sequence
  Synthetic Construct
uaucaauauuagcuuauauaccuguucuag

SEQ ID NO: 1796 - RNA, 30 nt, Artificial Sequence
  Synthetic Construct
aaggccuuuuuucuuccuuuccaauugaua

SEQ ID NO: 1797 - RNA, 30 nt, Artificial Sequence
  Synthetic Construct
uauaccuguucuaguuuuaaauggcaaaua

SEQ ID NO: 1798 - RNA, 30 nt, Artificial Sequence
  Synthetic Construct
auguguuucuccaggguacuguacacgcua

SEQ ID NO: 1799 - RNA, 30 nt, Artificial Sequence
  Synthetic Construct
cuccaggguacuguacacgcuaaaaggcau

SEQ ID NO: 1800 - RNA, 30 nt, Artificial Sequence
  Synthetic Construct
uccaggguacuguacacgcuaaaaggcauc

SEQ ID NO: 1801 - RNA, 30 nt, Artificial Sequence
  Synthetic Construct
caaauuucacauuuguaaacguccuucccc

SEQ ID NO: 1802 - RNA, 30 nt, Artificial Sequence
  Synthetic Construct
cacauuuguaaacguccuuccccaccuggc

SEQ ID NO: 1803 - RNA, 30 nt, Artificial Sequence
  Synthetic Construct
acauuuguaaacguccuuccccaccuggcc

SEQ ID NO: 1804 - RNA, 30 nt, Artificial Sequence
  Synthetic Construct
guaaacguccuuccccaccuggccaugcgu

SEQ ID NO: 1805 - RNA, 30 nt, Artificial Sequence
  Synthetic Construct
uaaacguccuuccccaccuggccaugcguu

SEQ ID NO: 1806 - RNA, 30 nt, Artificial Sequence
  Synthetic Construct
cccaccuggccaugcguuuucaugugccug

SEQ ID NO: 1807 - RNA, 30 nt, Artificial Sequence
  Synthetic Construct
ucaugugccuggugagcuugcuacucuggg

SEQ ID NO: 1808 - RNA, 30 nt, Artificial Sequence
  Synthetic Construct
caugugccuggugagcuugcuacucugggc

SEQ ID NO: 1809 - RNA, 30 nt, Artificial Sequence
  Synthetic Construct
augugccuggugagcuugcuacucugggca

SEQ ID NO: 1810 - RNA, 30 nt, Artificial Sequence
  Synthetic Construct
cuacucugggcacaggcauaguugcacagc

SEQ ID NO: 1811 - RNA, 30 nt, Artificial Sequence
  Synthetic Construct
cacagcucgcauuuauaaggccuuucgccc

SEQ ID NO: 1812 - RNA, 30 nt, Artificial Sequence
  Synthetic Construct
cauguguuucuccaggguacuguacacgcu

SEQ ID NO: 1813 - RNA, 30 nt, Artificial Sequence
  Synthetic Construct
auaaggccuuucgcccguguggcuucuccu

SEQ ID NO: 1814 - RNA, 30 nt, Artificial Sequence
  Synthetic Construct
cgcccguguggcuucuccuguggacaguga

SEQ ID NO: 1815 - RNA, 30 nt, Artificial Sequence
  Synthetic Construct
gcccguguggcuucuccuguggacagugag

SEQ ID NO: 1816 - RNA, 30 nt, Artificial Sequence
  Synthetic Construct
uccuguggacagugagauugcuacaguucu

SEQ ID NO: 1817 - RNA, 30 nt, Artificial Sequence
  Synthetic Construct
cuacaguucuugaagacuuucccacaguac

SEQ ID NO: 1818 - RNA, 30 nt, Artificial Sequence
  Synthetic Construct
uugaagacuuucccacaguacucacaagug

SEQ ID NO: 1819 - RNA, 30 nt, Artificial Sequence
  Synthetic Construct
aagacuuucccacaguacucacaagugucg

SEQ ID NO: 1820 - RNA, 30 nt, Artificial Sequence
  Synthetic Construct
cccacaguacucacaagugucgcugcgucu

SEQ ID NO: 1821 - RNA, 30 nt, Artificial Sequence
  Synthetic Construct
ccacaguacucacaagugucgcugcgucug

SEQ ID NO: 1822 - RNA, 30 nt, Artificial Sequence
  Synthetic Construct
ugagcugggccugcccgggcccggaccacu

SEQ ID NO: 1823 - RNA, 30 nt, Artificial Sequence
  Synthetic Construct
gagcugggccugcccgggcccggaccacua

SEQ ID NO: 1824 - RNA, 30 nt, Artificial Sequence
  Synthetic Construct
agcugggccugcccgggcccggaccacuaa

SEQ ID NO: 1825 - RNA, 30 nt, Artificial Sequence
  Synthetic Construct
ccgugccgcugcgccccgagaucccuccgu

SEQ ID NO: 1826 - RNA, 30 nt, Artificial Sequence
  Synthetic Construct
uccgaggagugcuccgacgaggaggcaaaa

SEQ ID NO: 1827 - RNA, 30 nt, Artificial Sequence
  Synthetic Construct
ucuggagucuccgaagcuaaggaagggauc

SEQ ID NO: 1828 - RNA, 30 nt, Artificial Sequence
  Synthetic Construct
uaaggccuuucgcccguguggcuucuccug

SEQ ID NO: 1829 - RNA, 30 nt, Artificial Sequence
  Synthetic Construct
ucauguguuucuccaggguacuguacacgc

SEQ ID NO: 1830 - RNA, 30 nt, Artificial Sequence
  Synthetic Construct
uucauguguuucuccaggguacuguacacg

SEQ ID NO: 1831 - RNA, 30 nt, Artificial Sequence
  Synthetic Construct
uuucauguguuucuccaggguacuguacac

SEQ ID NO: 1832 - RNA, 30 nt, Artificial Sequence
  Synthetic Construct
aaaaaaaaacauacacaacauguaaauuau

SEQ ID NO: 1833 - RNA, 30 nt, Artificial Sequence
  Synthetic Construct
aaaaaaaacauacacaacauguaaauuauu

SEQ ID NO: 1834 - RNA, 30 nt, Artificial Sequence
  Synthetic Construct
uugcacaagagaaaggcucaaaguuugcgu

SEQ ID NO: 1835 - RNA, 30 nt, Artificial Sequence
  Synthetic Construct
cacaagagaaaggcucaaaguuugcguaaa

SEQ ID NO: 1836 - RNA, 30 nt, Artificial Sequence
  Synthetic Construct
gcguaaaaugcaauaguauugccccauaca

SEQ ID NO: 1837 - RNA, 30 nt, Artificial Sequence
  Synthetic Construct
cguaaaaugcaauaguauugccccauacag

SEQ ID NO: 1838 - RNA, 30 nt, Artificial Sequence
  Synthetic Construct
ccccauacagaucaugcauucaaacgguga

SEQ ID NO: 1839 - RNA, 30 nt, Artificial Sequence
  Synthetic Construct
aaacggugagaacauaaaggaaaaaaaaaa

SEQ ID NO: 1840 - RNA, 30 nt, Artificial Sequence
  Synthetic Construct
uuagcuucguuacuucuguuuguuuguuug

SEQ ID NO: 1841 - RNA, 30 nt, Artificial Sequence
  Synthetic Construct
gcuucguuacuucuguuuguuuguuuguuu

SEQ ID NO: 1842 - RNA, 30 nt, Artificial Sequence
  Synthetic Construct
guuacuucuguuuguuuguuuguuuguuua

SEQ ID NO: 1843 - RNA, 30 nt, Artificial Sequence
  Synthetic Construct
cuucuguuuguuuguuuguuuguuuaaauc

SEQ ID NO: 1844 - RNA, 30 nt, Artificial Sequence
  Synthetic Construct
uguuuguuuguuuguuuguuuaaaucacau

SEQ ID NO: 1845 - RNA, 30 nt, Artificial Sequence
  Synthetic Construct
guuuguuuguuuguuuaaaucacaugggac

SEQ ID NO: 1846 - RNA, 30 nt, Artificial Sequence
  Synthetic Construct
uuuguuuguuuguuuaaaucacaugggacu

SEQ ID NO: 1847 - RNA, 30 nt, Artificial Sequence
  Synthetic Construct
guuuguuuguuuaaaucacaugggacuaga

SEQ ID NO: 1848 - RNA, 30 nt, Artificial Sequence
  Synthetic Construct
uuuguuuguuuaaaucacaugggacuagaa

SEQ ID NO: 1849 - RNA, 30 nt, Artificial Sequence
  Synthetic Construct
aacacucgaucacugugccauuuuuucaug

SEQ ID NO: 1850 - RNA, 30 nt, Artificial Sequence
  Synthetic Construct
uucaacacucgaucacugugccauuuuuuc

SEQ ID NO: 1851 - RNA, 30 nt, Artificial Sequence
  Synthetic Construct
uaucauuauucaacacucgaucacugugcc

SEQ ID NO: 1852 - RNA, 30 nt, Artificial Sequence
  Synthetic Construct
auaucauuauucaacacucgaucacugugc

SEQ ID NO: 1853 - RNA, 30 nt, Artificial Sequence
  Synthetic Construct
uauaucauuauucaacacucgaucacugug

SEQ ID NO: 1854 - RNA, 30 nt, Artificial Sequence
  Synthetic Construct
uuauaucauuauucaacacucgaucacugu

SEQ ID NO: 1855 - RNA, 30 nt, Artificial Sequence
  Synthetic Construct
gagcugccuggaggccgcguagccggcgag

SEQ ID NO: 1856 - RNA, 30 nt, Artificial Sequence
  Synthetic Construct
aguuuuuauaucauuauucaacacucgauc

SEQ ID NO: 1857 - RNA, 30 nt, Artificial Sequence
  Synthetic Construct
aaucacaugggacuagaaaaaaauccuaca

SEQ ID NO: 1858 - RNA, 30 nt, Artificial Sequence
  Synthetic Construct
aaaucacaugggacuagaaaaaaauccuac

SEQ ID NO: 1859 - RNA, 30 nt, Artificial Sequence
  Synthetic Construct
uuuaaaucacaugggacuagaaaaaaaucc

SEQ ID NO: 1860 - RNA, 30 nt, Artificial Sequence
  Synthetic Construct
guuuaaaucacaugggacuagaaaaaaauc

SEQ ID NO: 1861 - RNA, 30 nt, Artificial Sequence
  Synthetic Construct
uuuguuuaaaucacaugggacuagaaaaaa

SEQ ID NO: 1862 - RNA, 30 nt, Artificial Sequence
  Synthetic Construct
guuuguuuaaaucacaugggacuagaaaaa

SEQ ID NO: 1863 - RNA, 30 nt, Artificial Sequence
  Synthetic Construct
auauaccucuauucaguuuuuauaucauua

SEQ ID NO: 1864 - RNA, 30 nt, Artificial Sequence
  Synthetic Construct
agcugccuggaggccgcguagccggcgagc

SEQ ID NO: 1865 - RNA, 30 nt, Artificial Sequence
  Synthetic Construct
uccguguugggcaucgcggccgggggcagg

SEQ ID NO: 1866 - RNA, 30 nt, Artificial Sequence
  Synthetic Construct
ggcaucgcggccgggggcaggucgaacucc

SEQ ID NO: 1867 - RNA, 30 nt, Artificial Sequence
  Synthetic Construct
aacgucuugccgcagaacucgcaugacuug

SEQ ID NO: 1868 - RNA, 30 nt, Artificial Sequence
  Synthetic Construct
ccgcagaacucgcaugacuuggacuugacc

SEQ ID NO: 1869 - RNA, 30 nt, Artificial Sequence
  Synthetic Construct
gacuugaccgggggcugggagggaggaggg

SEQ ID NO: 1870 - RNA, 30 nt, Artificial Sequence
  Synthetic Construct
accgggggcugggagggaggaggggcggau

SEQ ID NO: 1871 - RNA, 30 nt, Artificial Sequence
  Synthetic Construct
cagaggagggagggggggcgucgccaggaa

SEQ ID NO: 1872 - RNA, 30 nt, Artificial Sequence
  Synthetic Construct
cuaccuggcuggaaugguugcaguaaccuu

SEQ ID NO: 1873 - RNA, 30 nt, Artificial Sequence
  Synthetic Construct
caguaaccuuugcauagggcugggccggcc

SEQ ID NO: 1874 - RNA, 30 nt, Artificial Sequence
  Synthetic Construct
gcauagggcugggccggccuggggacagcg

SEQ ID NO: 1875 - RNA, 30 nt, Artificial Sequence
  Synthetic Construct
cauagggcugggccggccuggggacagcgg

SEQ ID NO: 1876 - RNA, 30 nt, Artificial Sequence
  Synthetic Construct
ccugccagcucucuaagucuccuagagaaa

SEQ ID NO: 1877 - RNA, 30 nt, Artificial Sequence
  Synthetic Construct
gauucaaccgcagcacccugucaaaggcac

SEQ ID NO: 1878 - RNA, 30 nt, Artificial Sequence
  Synthetic Construct
aaccgcagcacccugucaaaggcacucggg

SEQ ID NO: 1879 - RNA, 30 nt, Artificial Sequence
  Synthetic Construct
cgcccccaggcgcucuaugcgguggggguc

SEQ ID NO: 1880 - RNA, 30 nt, Artificial Sequence
  Synthetic Construct
ugccaggccggaagccucucucgauacuga

SEQ ID NO: 1881 - RNA, 30 nt, Artificial Sequence
  Synthetic Construct
uuagcagguuaaagggguuauugucugcaa

SEQ ID NO: 1882 - RNA, 30 nt, Artificial Sequence
  Synthetic Construct
gcagguuaaagggguuauugucugcaauau

SEQ ID NO: 1883 - RNA, 30 nt, Artificial Sequence
  Synthetic Construct
aagggguuauugucugcaauaugaauccca

SEQ ID NO: 1884 - RNA, 30 nt, Artificial Sequence
  Synthetic Construct
uacauguguagcugcugggcucaucuuuac

SEQ ID NO: 1885 - RNA, 30 nt, Artificial Sequence
  Synthetic Construct
caaguuguacauguguagcugcugggcuca

SEQ ID NO: 1886 - RNA, 30 nt, Artificial Sequence
  Synthetic Construct
gcaaguuguacauguguagcugcugggcuc

SEQ ID NO: 1887 - RNA, 30 nt, Artificial Sequence
  Synthetic Construct
caagagaaaccaugcacuggugaauggcug

SEQ ID NO: 1888 - RNA, 30 nt, Artificial Sequence
  Synthetic Construct
ugugcguguugcaagagaaaccaugcacug

SEQ ID NO: 1889 - RNA, 30 nt, Artificial Sequence
  Synthetic Construct
auccaugaguguucugugcguguugcaaga

SEQ ID NO: 1890 - RNA, 30 nt, Artificial Sequence
  Synthetic Construct
gaacgucuugccgcagaacucgcaugacuu

SEQ ID NO: 1891 - RNA, 30 nt, Artificial Sequence
  Synthetic Construct
uuaauccaugaguguucugugcguguugca

SEQ ID NO: 1892 - RNA, 30 nt, Artificial Sequence
  Synthetic Construct
cuaaguagauucuuaauccaugaguguucu

SEQ ID NO: 1893 - RNA, 30 nt, Artificial Sequence
  Synthetic Construct
gcuuucuaaguagauucuuaauccaugagu

SEQ ID NO: 1894 - RNA, 30 nt, Artificial Sequence
  Synthetic Construct
cguguucgcuuucuaaguagauucuuaauc

SEQ ID NO: 1895 - RNA, 30 nt, Artificial Sequence
  Synthetic Construct
ugcaccuaguccugaagggauaccaacccg

SEQ ID NO: 1896 - RNA, 30 nt, Artificial Sequence
  Synthetic Construct
ucugcaauaugaaucccauggagagguggc

SEQ ID NO: 1897 - RNA, 30 nt, Artificial Sequence
  Synthetic Construct
uugucugcaauaugaaucccauggagaggu

SEQ ID NO: 1898 - RNA, 30 nt, Artificial Sequence
  Synthetic Construct
uaaguagauucuuaauccaugaguguucug

SEQ ID NO: 1899 - RNA, 30 nt, Artificial Sequence
  Synthetic Construct
aaauagccauaacauaccauacaugcuguc

SEQ ID NO: 1900 - RNA, 30 nt, Artificial Sequence
  Synthetic Construct
cucugaaauuugaacgucuugccgcagaac

SEQ ID NO: 1901 - RNA, 30 nt, Artificial Sequence
  Synthetic Construct
uagggcuucucgcccguguggcugcgccgg

SEQ ID NO: 1902 - RNA, 30 nt, Artificial Sequence
  Synthetic Construct
ucgagcuugaugcgcuuagagaaggggcuc

SEQ ID NO: 1903 - RNA, 30 nt, Artificial Sequence
  Synthetic Construct
augcgcuuagagaaggggcucagcgagcug

SEQ ID NO: 1904 - RNA, 30 nt, Artificial Sequence
  Synthetic Construct
gagaaggggcucagcgagcuggggcugccc

SEQ ID NO: 1905 - RNA, 30 nt, Artificial Sequence
  Synthetic Construct
uuggacaggccccccgaggccgacucgccc

SEQ ID NO: 1906 - RNA, 30 nt, Artificial Sequence
  Synthetic Construct
uggacaggccccccgaggccgacucgcccg

SEQ ID NO: 1907 - RNA, 30 nt, Artificial Sequence
  Synthetic Construct
ggacaggccccccgaggccgacucgcccgg

SEQ ID NO: 1908 - RNA, 30 nt, Artificial Sequence
  Synthetic Construct
gacaggccccccgaggccgacucgcccggg

SEQ ID NO: 1909 - RNA, 30 nt, Artificial Sequence
  Synthetic Construct
acagugccaucgucuaugcgguccgacucg

SEQ ID NO: 1910 - RNA, 30 nt, Artificial Sequence
  Synthetic Construct
gucgcaagugucccuguggcccucggccuc

SEQ ID NO: 1911 - RNA, 30 nt, Artificial Sequence
  Synthetic Construct
ugcuucucgcccaggaccugguggaaggcc

SEQ ID NO: 1912 - RNA, 30 nt, Artificial Sequence
  Synthetic Construct
ucgcccaggaccugguggaaggccucgcug

SEQ ID NO: 1913 - RNA, 30 nt, Artificial Sequence
  Synthetic Construct
ucgugguggcgcgccgccuccaggcucagc

SEQ ID NO: 1914 - RNA, 30 nt, Artificial Sequence
  Synthetic Construct
cuccucuucuuccucuuccucgucguccuc

SEQ ID NO: 1915 - RNA, 30 nt, Artificial Sequence
  Synthetic Construct
uuccucuuccucgucguccuccucuuccuc

SEQ ID NO: 1916 - RNA, 30 nt, Artificial Sequence
  Synthetic Construct
cucuuccucgucguccuccucuuccuccuc

SEQ ID NO: 1917 - RNA, 30 nt, Artificial Sequence
  Synthetic Construct
cucgucguccuccucuuccuccucgucccc

SEQ ID NO: 1918 - RNA, 30 nt, Artificial Sequence
  Synthetic Construct
cuccucguccccguucuccgggaucagguu

SEQ ID NO: 1919 - RNA, 30 nt, Artificial Sequence
  Synthetic Construct
cacuuguagggcuucucgcccguguggcug

SEQ ID NO: 1920 - RNA, 30 nt, Artificial Sequence
  Synthetic Construct
cuggccugggugcacgcguggucgcacagg

SEQ ID NO: 1921 - RNA, 30 nt, Artificial Sequence
  Synthetic Construct
agcuugcuggccugggugcacgcguggucg

SEQ ID NO: 1922 - RNA, 30 nt, Artificial Sequence
  Synthetic Construct
auguggcgcuucagcuugcuggccugggug

SEQ ID NO: 1923 - RNA, 30 nt, Artificial Sequence
  Synthetic Construct
ugcaugugcgucuucauguggcgcuucagc

SEQ ID NO: 1924 - RNA, 30 nt, Artificial Sequence
  Synthetic Construct
gugcaugugcgucuucauguggcgcuucag

SEQ ID NO: 1925 - RNA, 30 nt, Artificial Sequence
  Synthetic Construct
ucgcccguguggcugcgccggugcaccacc

SEQ ID NO: 1926 - RNA, 30 nt, Artificial Sequence
  Synthetic Construct
accgucaugggggacgauuugugcaugugc

SEQ ID NO: 1927 - RNA, 30 nt, Artificial Sequence
  Synthetic Construct
agcgcgcugcuggcgcugcccaccaagucg

SEQ ID NO: 1928 - RNA, 30 nt, Artificial Sequence
  Synthetic Construct
gccaccacggacuugagcgcgcugcuggcg

SEQ ID NO: 1929 - RNA, 30 nt, Artificial Sequence
  Synthetic Construct
aacuuggccaccacggacuugagcgcgcug

SEQ ID NO: 1930 - RNA, 30 nt, Artificial Sequence
  Synthetic Construct
ucgcucuugaacuuggccaccacggacuug

SEQ ID NO: 1931 - RNA, 30 nt, Artificial Sequence
  Synthetic Construct
gggucguucucgcucuugaacuuggccacc

SEQ ID NO: 1932 - RNA, 30 nt, Artificial Sequence
  Synthetic Construct
uccgggaucagguuggggucguucucgcuc

SEQ ID NO: 1933 - RNA, 30 nt, Artificial Sequence
  Synthetic Construct
cggggagcuggcgguggagagaccgucguc

SEQ ID NO: 1934 - RNA, 30 nt, Artificial Sequence
  Synthetic Construct
aaaauagccauaacauaccauacaugcugu

SEQ ID NO: 1935 - RNA, 30 nt, Artificial Sequence
  Synthetic Construct
gggacaauuuaaaauagccauaacauacca

SEQ ID NO: 1936 - RNA, 30 nt, Artificial Sequence
  Synthetic Construct
cucagcaacgaauuagggacaauuuaaaau

SEQ ID NO: 1937 - RNA, 30 nt, Artificial Sequence
  Synthetic Construct
cuaguguauuuaauugcguuccagggcuuu

SEQ ID NO: 1938 - RNA, 30 nt, Artificial Sequence
  Synthetic Construct
aauugcguuccagggcuuuugcacauuaca

SEQ ID NO: 1939 - RNA, 30 nt, Artificial Sequence
  Synthetic Construct
auugcguuccagggcuuuugcacauuacac

SEQ ID NO: 1940 - RNA, 30 nt, Artificial Sequence
  Synthetic Construct
cguuccagggcuuuugcacauuacacauuc

SEQ ID NO: 1941 - RNA, 30 nt, Artificial Sequence
  Synthetic Construct
cagggcuuuugcacauuacacauucaauuu

SEQ ID NO: 1942 - RNA, 30 nt, Artificial Sequence
  Synthetic Construct
ugcacauuacacauucaauuuaaucauugu

SEQ ID NO: 1943 - RNA, 30 nt, Artificial Sequence
  Synthetic Construct
gcacauuacacauucaauuuaaucauuguu

SEQ ID NO: 1944 - RNA, 30 nt, Artificial Sequence
  Synthetic Construct
cacauuacacauucaauuuaaucauuguuu

SEQ ID NO: 1945 - RNA, 30 nt, Artificial Sequence
  Synthetic Construct
cacauucaauuuaaucauuguuuaaaaaaa

SEQ ID NO: 1946 - RNA, 30 nt, Artificial Sequence
  Synthetic Construct
aauuuaaucauuguuuaaaaaaaauaaaac

SEQ ID NO: 1947 - RNA, 30 nt, Artificial Sequence
  Synthetic Construct
aaucauuguuuaaaaaaaauaaaacuuugg

SEQ ID NO: 1948 - RNA, 30 nt, Artificial Sequence
  Synthetic Construct
aucauuguuuaaaaaaaauaaaacuuuggg

SEQ ID NO: 1949 - RNA, 30 nt, Artificial Sequence
  Synthetic Construct
uuuaaaaaaaauaaaacuuugggcaaaaca

SEQ ID NO: 1950 - RNA, 30 nt, Artificial Sequence
  Synthetic Construct
aaaaaaaauaaaacuuugggcaaaacagcc

SEQ ID NO: 1951 - RNA, 30 nt, Artificial Sequence
  Synthetic Construct
aaaaaaauaaaacuuugggcaaaacagccc

SEQ ID NO: 1952 - RNA, 30 nt, Artificial Sequence
  Synthetic Construct
gggcaaaacagcccauuucuuuuaagcucu

SEQ ID NO: 1953 - RNA, 30 nt, Artificial Sequence
  Synthetic Construct
ggcaaaacagcccauuucuuuuaagcucuc

SEQ ID NO: 1954 - RNA, 30 nt, Artificial Sequence
  Synthetic Construct
aacuaaaggaaaaaugaugauuaacuagga

SEQ ID NO: 1955 - RNA, 30 nt, Artificial Sequence
  Synthetic Construct
uaaaauuaaacuaaaggaaaaaugaugauu

SEQ ID NO: 1956 - RNA, 30 nt, Artificial Sequence
  Synthetic Construct
auaaaauuaaacuaaaggaaaaaugaugau

SEQ ID NO: 1957 - RNA, 30 nt, Artificial Sequence
  Synthetic Construct
uuuauaaaauuaaacuaaaggaaaaaugau

SEQ ID NO: 1958 - RNA, 30 nt, Artificial Sequence
  Synthetic Construct
guuuauaaaauuaaacuaaaggaaaaauga

SEQ ID NO: 1959 - RNA, 30 nt, Artificial Sequence
  Synthetic Construct
uguuuauaaaauuaaacuaaaggaaaaaug

SEQ ID NO: 1960 - RNA, 30 nt, Artificial Sequence
  Synthetic Construct
auaaaaugaacuccuuacuaguguauuuaa

SEQ ID NO: 1961 - RNA, 30 nt, Artificial Sequence
  Synthetic Construct
uacugguauaaucaguuuuguuuauaaaau

SEQ ID NO: 1962 - RNA, 30 nt, Artificial Sequence
  Synthetic Construct
uauacugguauaaucaguuuuguuuauaaa

SEQ ID NO: 1963 - RNA, 30 nt, Artificial Sequence
  Synthetic Construct
agcucucaccaggagcaaaguagcuuuuau

SEQ ID NO: 1964 - RNA, 30 nt, Artificial Sequence
  Synthetic Construct
aagcucucaccaggagcaaaguagcuuuua

SEQ ID NO: 1965 - RNA, 30 nt, Artificial Sequence
  Synthetic Construct
uaagcucucaccaggagcaaaguagcuuuu

SEQ ID NO: 1966 - RNA, 30 nt, Artificial Sequence
  Synthetic Construct
uuuuaagcucucaccaggagcaaaguagcu

SEQ ID NO: 1967 - RNA, 30 nt, Artificial Sequence
  Synthetic Construct
cuuuuaagcucucaccaggagcaaaguagc

SEQ ID NO: 1968 - RNA, 30 nt, Artificial Sequence
  Synthetic Construct
auacugguauaaucaguuuuguuuauaaaa

SEQ ID NO: 1969 - RNA, 30 nt, Artificial Sequence
  Synthetic Construct
acuaggacauaaugggucaucuuuuuaggu

SEQ ID NO: 1970 - RNA, 30 nt, Artificial Sequence
  Synthetic Construct
aagcaaauaucuucauaaaaugaacuccuu

SEQ ID NO: 1971 - RNA, 30 nt, Artificial Sequence
  Synthetic Construct
aaaagacauuauuaaagcaaauaucuucau

SEQ ID NO: 1972 - RNA, 30 nt, Artificial Sequence
  Synthetic Construct
uaguuuuaaauggcaaauaguaccacguug

SEQ ID NO: 1973 - RNA, 30 nt, Artificial Sequence
  Synthetic Construct
uaaauggcaaauaguaccacguugugcuaa

SEQ ID NO: 1974 - RNA, 30 nt, Artificial Sequence
  Synthetic Construct
aaauggcaaauaguaccacguugugcuaau

SEQ ID NO: 1975 - RNA, 30 nt, Artificial Sequence
  Synthetic Construct
aauggcaaauaguaccacguugugcuaaua

SEQ ID NO: 1976 - RNA, 30 nt, Artificial Sequence
  Synthetic Construct
ugcuaauaaaucauauuauuuucuucuguu

SEQ ID NO: 1977 - RNA, 30 nt, Artificial Sequence
  Synthetic Construct
uuuucuucuguuccccucugucaaaccuua

SEQ ID NO: 1978 - RNA, 30 nt, Artificial Sequence
  Synthetic Construct
ucuucuguuccccucugucaaaccuuauug

SEQ ID NO: 1979 - RNA, 30 nt, Artificial Sequence
  Synthetic Construct
cuucuguuccccucugucaaaccuuauugu

SEQ ID NO: 1980 - RNA, 30 nt, Artificial Sequence
  Synthetic Construct
uucuguuccccucugucaaaccuuauuguc

SEQ ID NO: 1981 - RNA, 30 nt, Artificial Sequence
  Synthetic Construct
uguuccccucugucaaaccuuauugucagc

SEQ ID NO: 1982 - RNA, 30 nt, Artificial Sequence
  Synthetic Construct
cccucugucaaaccuuauugucagccucuu

SEQ ID NO: 1983 - RNA, 30 nt, Artificial Sequence
  Synthetic Construct
uugucagccucuuccuuucaauaugguaua

SEQ ID NO: 1984 - RNA, 30 nt, Artificial Sequence
  Synthetic Construct
ucagccucuuccuuucaauaugguauacaa

SEQ ID NO: 1985 - RNA, 30 nt, Artificial Sequence
  Synthetic Construct
cuuucaauaugguauacaaggucuuaaagu

SEQ ID NO: 1986 - RNA, 30 nt, Artificial Sequence
  Synthetic Construct
caauaugguauacaaggucuuaaaguuuau

SEQ ID NO: 1987 - RNA, 30 nt, Artificial Sequence
  Synthetic Construct
aauaugguauacaaggucuuaaaguuuauc

SEQ ID NO: 1988 - RNA, 30 nt, Artificial Sequence
  Synthetic Construct
aaguuuaucauuugauuguccacuugacaa

SEQ ID NO: 1989 - RNA, 30 nt, Artificial Sequence
  Synthetic Construct
aaaaagacauuauuaaagcaaauaucuuca

SEQ ID NO: 1990 - RNA, 30 nt, Artificial Sequence
  Synthetic Construct
uaaaaagacauuauuaaagcaaauaucuuc

SEQ ID NO: 1991 - RNA, 30 nt, Artificial Sequence
  Synthetic Construct
uuaaaaagacauuauuaaagcaaauaucuu

SEQ ID NO: 1992 - RNA, 30 nt, Artificial Sequence
  Synthetic Construct
gugccaguauuuuuaaaaagacauuauuaa

SEQ ID NO: 1993 - RNA, 30 nt, Artificial Sequence
  Synthetic Construct
ggugccaguauuuuuaaaaagacauuauua

SEQ ID NO: 1994 - RNA, 30 nt, Artificial Sequence
  Synthetic Construct
uggugccaguauuuuuaaaaagacauuauu

SEQ ID NO: 1995 - RNA, 30 nt, Artificial Sequence
  Synthetic Construct
uuaaagcaaauaucuucauaaaaugaacuc

SEQ ID NO: 1996 - RNA, 30 nt, Artificial Sequence
  Synthetic Construct
uuuuggugccaguauuuuuaaaaagacauu

SEQ ID NO: 1997 - RNA, 30 nt, Artificial Sequence
  Synthetic Construct
acaaccaaguagaucuggaucuauuucuuu

SEQ ID NO: 1998 - RNA, 30 nt, Artificial Sequence
  Synthetic Construct
uccacuugacaaccaaguagaucuggaucu

SEQ ID NO: 1999 - RNA, 30 nt, Artificial Sequence
  Synthetic Construct
auuguccacuugacaaccaaguagaucugg

SEQ ID NO: 2000 - RNA, 30 nt, Artificial Sequence
  Synthetic Construct
gauuguccacuugacaaccaaguagaucug

SEQ ID NO: 2001 - RNA, 30 nt, Artificial Sequence
  Synthetic Construct
ucauuugauuguccacuugacaaccaagua

SEQ ID NO: 2002 - RNA, 30 nt, Artificial Sequence
  Synthetic Construct
aucauuugauuguccacuugacaaccaagu

SEQ ID NO: 2003 - RNA, 30 nt, Artificial Sequence
  Synthetic Construct
cuuuuggugccaguauuuuuaaaaagacau

SEQ ID NO: 2004 - RNA, 30 nt, Artificial Sequence
  Synthetic Construct
gcuuauauaccuguucuaguuuuaaauggc

SEQ ID NO: 2005 - RNA, 30 nt, Artificial Sequence
  Synthetic Construct
uuagguagccauuguugugagaaauacaau

SEQ ID NO: 2006 - RNA, 30 nt, Artificial Sequence
  Synthetic Construct
agguagccauuguugugagaaauacaauau

SEQ ID NO: 2007 - RNA, 30 nt, Artificial Sequence
  Synthetic Construct
auacauuuaacccuuuagagacagacauuu

SEQ ID NO: 2008 - RNA, 30 nt, Artificial Sequence
  Synthetic Construct
aacccuuuagagacagacauuuagcucaua

SEQ ID NO: 2009 - RNA, 30 nt, Artificial Sequence
  Synthetic Construct
acccuuuagagacagacauuuagcucauag

SEQ ID NO: 2010 - RNA, 30 nt, Artificial Sequence
  Synthetic Construct
agagacagacauuuagcucauagagauuuu

SEQ ID NO: 2011 - RNA, 30 nt, Artificial Sequence
  Synthetic Construct
gagacagacauuuagcucauagagauuuuu

SEQ ID NO: 2012 - RNA, 30 nt, Artificial Sequence
  Synthetic Construct
agcucauagagauuuuuuuucagugcuauc

SEQ ID NO: 2013 - RNA, 30 nt, Artificial Sequence
  Synthetic Construct
gcucauagagauuuuuuuucagugcuaucu

SEQ ID NO: 2014 - RNA, 30 nt, Artificial Sequence
  Synthetic Construct
uuuuucagugcuaucuauucugucuauaga

SEQ ID NO: 2015 - RNA, 30 nt, Artificial Sequence
  Synthetic Construct
uuuucagugcuaucuauucugucuauagag

SEQ ID NO: 2016 - RNA, 30 nt, Artificial Sequence
  Synthetic Construct
uuucagugcuaucuauucugucuauagagg

SEQ ID NO: 2017 - RNA, 30 nt, Artificial Sequence
  Synthetic Construct
uucagugcuaucuauucugucuauagaggg

SEQ ID NO: 2018 - RNA, 30 nt, Artificial Sequence
  Synthetic Construct
ucagugcuaucuauucugucuauagagggu

SEQ ID NO: 2019 - RNA, 30 nt, Artificial Sequence
  Synthetic Construct
cagugcuaucuauucugucuauagaggguu

SEQ ID NO: 2020 - RNA, 30 nt, Artificial Sequence
  Synthetic Construct
agugcuaucuauucugucuauagaggguua

SEQ ID NO: 2021 - RNA, 30 nt, Artificial Sequence
  Synthetic Construct
ugucuauagaggguuaauccaaagacuguu

SEQ ID NO: 2022 - RNA, 30 nt, Artificial Sequence
  Synthetic Construct
auccaaagacuguuuuuccuccucacguua

SEQ ID NO: 2023 - RNA, 30 nt, Artificial Sequence
  Synthetic Construct
uuccuccucacguuauaaaauaaaacugua

SEQ ID NO: 2024 - RNA, 30 nt, Artificial Sequence
  Synthetic Construct
gcucagcaacgaauuagggacaauuuaaaa

SEQ ID NO: 2025 - RNA, 30 nt, Artificial Sequence
  Synthetic Construct
ucucagaacggaacuggaaacagcaacaug

SEQ ID NO: 2026 - RNA, 30 nt, Artificial Sequence
  Synthetic Construct
cucucagaacggaacuggaaacagcaacau

SEQ ID NO: 2027 - RNA, 30 nt, Artificial Sequence
  Synthetic Construct
ucucucagaacggaacuggaaacagcaaca

SEQ ID NO: 2028 - RNA, 30 nt, Artificial Sequence
  Synthetic Construct
uucucucagaacggaacuggaaacagcaac

SEQ ID NO: 2029 - RNA, 30 nt, Artificial Sequence
  Synthetic Construct
ucucucucucucuuuuucucucagaacgga

SEQ ID NO: 2030 - RNA, 30 nt, Artificial Sequence
  Synthetic Construct
caauugauacauuuaacccuuuagagacag

SEQ ID NO: 2031 - RNA, 30 nt, Artificial Sequence
  Synthetic Construct
cucucucucucucuuuuucucucagaacgg

SEQ ID NO: 2032 - RNA, 30 nt, Artificial Sequence
  Synthetic Construct
uucucucucucucucuuuuucucucagaac

SEQ ID NO: 2033 - RNA, 30 nt, Artificial Sequence
  Synthetic Construct
cagaauguaugcagcauggucuuuuucucu

SEQ ID NO: 2034 - RNA, 30 nt, Artificial Sequence
  Synthetic Construct
uaaaauaaaacuguacaugauauguauuac

SEQ ID NO: 2035 - RNA, 30 nt, Artificial Sequence
  Synthetic Construct
cuccucacguuauaaaauaaaacuguacau

SEQ ID NO: 2036 - RNA, 30 nt, Artificial Sequence
  Synthetic Construct
ccuccucacguuauaaaauaaaacuguaca

SEQ ID NO: 2037 - RNA, 30 nt, Artificial Sequence
  Synthetic Construct
uccuccucacguuauaaaauaaaacuguac

SEQ ID NO: 2038 - RNA, 30 nt, Artificial Sequence
  Synthetic Construct
ucucucucucucucuuuuucucucagaacg

SEQ ID NO: 2039 - RNA, 30 nt, Artificial Sequence
  Synthetic Construct
uagguagccauuguugugagaaauacaaua

SEQ ID NO: 2040 - RNA, 30 nt, Artificial Sequence
  Synthetic Construct
ccaauugauacauuuaacccuuuagagaca

SEQ ID NO: 2041 - RNA, 30 nt, Artificial Sequence
  Synthetic Construct
uuccuuuccaauugauacauuuaacccuuu

SEQ ID NO: 2042 - RNA, 30 nt, Artificial Sequence
  Synthetic Construct
gguagccauuguugugagaaauacaauaua

SEQ ID NO: 2043 - RNA, 30 nt, Artificial Sequence
  Synthetic Construct
uugugagaaauacaauauagaauuauaugc

SEQ ID NO: 2044 - RNA, 30 nt, Artificial Sequence
  Synthetic Construct
ugagaaauacaauauagaauuauaugcuag

SEQ ID NO: 2045 - RNA, 30 nt, Artificial Sequence
  Synthetic Construct
uaugcuaguuccuaagguuuauuaccucac

SEQ ID NO: 2046 - RNA, 30 nt, Artificial Sequence
  Synthetic Construct
cuaagguuuauuaccucacccaaugcugaa

SEQ ID NO: 2047 - RNA, 30 nt, Artificial Sequence
  Synthetic Construct
auuaccucacccaaugcugaauuaagcuac

SEQ ID NO: 2048 - RNA, 30 nt, Artificial Sequence
  Synthetic Construct
uuaccucacccaaugcugaauuaagcuaca

SEQ ID NO: 2049 - RNA, 30 nt, Artificial Sequence
  Synthetic Construct
ccucacccaaugcugaauuaagcuacaagu

SEQ ID NO: 2050 - RNA, 30 nt, Artificial Sequence
  Synthetic Construct
agcuacaaguuuauaacaaguagaaagaac

SEQ ID NO: 2051 - RNA, 30 nt, Artificial Sequence
  Synthetic Construct
auaacaaguagaaagaaccaucgauguggu

SEQ ID NO: 2052 - RNA, 30 nt, Artificial Sequence
  Synthetic Construct
uaacaaguagaaagaaccaucgaugugguu

SEQ ID NO: 2053 - RNA, 30 nt, Artificial Sequence
  Synthetic Construct
uaauagauccaaggcacucauauuuuaaaa

SEQ ID NO: 2054 - RNA, 30 nt, Artificial Sequence
  Synthetic Construct
aauagauccaaggcacucauauuuuaaaac

SEQ ID NO: 2055 - RNA, 30 nt, Artificial Sequence
  Synthetic Construct
auagauccaaggcacucauauuuuaaaacc

SEQ ID NO: 2056 - RNA, 30 nt, Artificial Sequence
  Synthetic Construct
uaaaaccaaaugauagaauaaacuuguucu

SEQ ID NO: 2057 - RNA, 30 nt, Artificial Sequence
  Synthetic Construct
aaaaccaaaugauagaauaaacuuguucug

SEQ ID NO: 2058 - RNA, 30 nt, Artificial Sequence
  Synthetic Construct
aaaccaaaugauagaauaaacuuguucugu

SEQ ID NO: 2059 - RNA, 30 nt, Artificial Sequence
  Synthetic Construct
cuuccuuuccaauugauacauuuaacccuu

SEQ ID NO: 2060 - RNA, 30 nt, Artificial Sequence
  Synthetic Construct
ucuuccuuuccaauugauacauuuaacccu

SEQ ID NO: 2061 - RNA, 30 nt, Artificial Sequence
  Synthetic Construct
uucuuccuuuccaauugauacauuuaaccc

SEQ ID NO: 2062 - RNA, 30 nt, Artificial Sequence
  Synthetic Construct
uuucuuccuuuccaauugauacauuuaacc

SEQ ID NO: 2063 - RNA, 30 nt, Artificial Sequence
  Synthetic Construct
uggcaguugucugcauuaaccuguucauac

SEQ ID NO: 2064 - RNA, 30 nt, Artificial Sequence
  Synthetic Construct
ucaauucaaggccuuuuuucuuccuuucca

SEQ ID NO: 2065 - RNA, 30 nt, Artificial Sequence
  Synthetic Construct
cuuuccaauugauacauuuaacccuuuaga

SEQ ID NO: 2066 - RNA, 30 nt, Artificial Sequence
  Synthetic Construct
gucaauucaaggccuuuuuucuuccuuucc

SEQ ID NO: 2067 - RNA, 30 nt, Artificial Sequence
  Synthetic Construct
uguuaauuugucaauucaaggccuuuuuuc

SEQ ID NO: 2068 - RNA, 30 nt, Artificial Sequence
  Synthetic Construct
cuguuaauuugucaauucaaggccuuuuuu

SEQ ID NO: 2069 - RNA, 30 nt, Artificial Sequence
  Synthetic Construct
ucuguuaauuugucaauucaaggccuuuuu

SEQ ID NO: 2070 - RNA, 30 nt, Artificial Sequence
  Synthetic Construct
uucuguuaauuugucaauucaaggccuuuu

SEQ ID NO: 2071 - RNA, 30 nt, Artificial Sequence
  Synthetic Construct
uguuuuucuguuaauuugucaauucaaggc

SEQ ID NO: 2072 - RNA, 30 nt, Artificial Sequence
  Synthetic Construct
uucuguuuuucuguuaauuugucaauucaa

SEQ ID NO: 2073 - RNA, 30 nt, Artificial Sequence
  Synthetic Construct
auuugucaauucaaggccuuuuuucuuccu

SEQ ID NO: 2074 - RNA, 30 nt, Artificial Sequence
  Synthetic Construct
uuggcaguugucugcauuaaccuguucaua

SEQ ID NO: 2075 - RNA, 30 nt, Artificial Sequence
  Synthetic Construct
cuucuaucacccuacauuccagcaucuuac

SEQ ID NO: 2076 - RNA, 30 nt, Artificial Sequence
  Synthetic Construct
uuuuggcaguugucugcauuaaccuguuca

SEQ ID NO: 2077 - RNA, 30 nt, Artificial Sequence
  Synthetic Construct
acagaaaaacagaacaaguuuauucuauca

SEQ ID NO: 2078 - RNA, 30 nt, Artificial Sequence
  Synthetic Construct
auucuaucauuugguuuuaaaauaugagug

SEQ ID NO: 2079 - RNA, 30 nt, Artificial Sequence
  Synthetic Construct
uucuaucauuugguuuuaaaauaugagugc

SEQ ID NO: 2080 - RNA, 30 nt, Artificial Sequence
  Synthetic Construct
uaucauuugguuuuaaaauaugagugccuu

SEQ ID NO: 2081 - RNA, 30 nt, Artificial Sequence
  Synthetic Construct
gguuuuaaaauaugagugccuuggaucuau

SEQ ID NO: 2082 - RNA, 30 nt, Artificial Sequence
  Synthetic Construct
guuuuaaaauaugagugccuuggaucuauu

SEQ ID NO: 2083 - RNA, 30 nt, Artificial Sequence
  Synthetic Construct
uaaaauaugagugccuuggaucuauuaaaa

SEQ ID NO: 2084 - RNA, 30 nt, Artificial Sequence
  Synthetic Construct
aaaauaugagugccuuggaucuauuaaaac

SEQ ID NO: 2085 - RNA, 30 nt, Artificial Sequence
  Synthetic Construct
aaauaugagugccuuggaucuauuaaaacc

SEQ ID NO: 2086 - RNA, 30 nt, Artificial Sequence
  Synthetic Construct
gaucuauuaaaaccacaucgaugguucuuu

SEQ ID NO: 2087 - RNA, 30 nt, Artificial Sequence
  Synthetic Construct
aaaccacaucgaugguucuuucuacuuguu

SEQ ID NO: 2088 - RNA, 30 nt, Artificial Sequence
  Synthetic Construct
uuucuacuuguuauaaacuuguagcuuaau

SEQ ID NO: 2089 - RNA, 30 nt, Artificial Sequence
  Synthetic Construct
cuacuuguuauaaacuuguagcuuaauuca

SEQ ID NO: 2090 - RNA, 30 nt, Artificial Sequence
  Synthetic Construct
uacuuguuauaaacuuguagcuuaauucag

SEQ ID NO: 2091 - RNA, 30 nt, Artificial Sequence
  Synthetic Construct
acaaauuaacagaaaaacagaacaaguuua

SEQ ID NO: 2092 - RNA, 30 nt, Artificial Sequence
  Synthetic Construct
uuauaaacuuguagcuuaauucagcauugg

SEQ ID NO: 2093 - RNA, 30 nt, Artificial Sequence
  Synthetic Construct
uagcuuaauucagcauugggugagguaaua

SEQ ID NO: 2094 - RNA, 30 nt, Artificial Sequence
  Synthetic Construct
auucagcauugggugagguaauaaaccuua

SEQ ID NO: 2095 - RNA, 30 nt, Artificial Sequence
  Synthetic Construct
agcauugggugagguaauaaaccuuaggaa

SEQ ID NO: 2096 - RNA, 30 nt, Artificial Sequence
  Synthetic Construct
ggugagguaauaaaccuuaggaacuagcau

SEQ ID NO: 2097 - RNA, 30 nt, Artificial Sequence
  Synthetic Construct
ggaacuagcauauaauucuauauuguauuu

SEQ ID NO: 2098 - RNA, 30 nt, Artificial Sequence
  Synthetic Construct
uauauuguauuucucacaacaauggcuacc

SEQ ID NO: 2099 - RNA, 30 nt, Artificial Sequence
  Synthetic Construct
uauuucucacaacaauggcuaccuaaaaag

SEQ ID NO: 2100 - RNA, 30 nt, Artificial Sequence
  Synthetic Construct
cucacaacaauggcuaccuaaaaagaugac

SEQ ID NO: 2101 - RNA, 30 nt, Artificial Sequence
  Synthetic Construct
ucacaacaauggcuaccuaaaaagaugacc

SEQ ID NO: 2102 - RNA, 30 nt, Artificial Sequence
  Synthetic Construct
uguccuaguuaaucaucauuuuuccuuuag

SEQ ID NO: 2103 - RNA, 30 nt, Artificial Sequence
  Synthetic Construct
aucaucauuuuuccuuuaguuuaauuuuau

SEQ ID NO: 2104 - RNA, 30 nt, Artificial Sequence
  Synthetic Construct
uuccuuuaguuuaauuuuauaaacaaaacu

SEQ ID NO: 2105 - RNA, 30 nt, Artificial Sequence
  Synthetic Construct
uccuuuaguuuaauuuuauaaacaaaacug

SEQ ID NO: 2106 - RNA, 30 nt, Artificial Sequence
  Synthetic Construct
ccuuuaguuuaauuuuauaaacaaaacuga

SEQ ID NO: 2107 - RNA, 30 nt, Artificial Sequence
  Synthetic Construct
uaaacuuguagcuuaauucagcauugggug

SEQ ID NO: 2108 - RNA, 30 nt, Artificial Sequence
  Synthetic Construct
aauugacaaauuaacagaaaaacagaacaa

SEQ ID NO: 2109 - RNA, 30 nt, Artificial Sequence
  Synthetic Construct
gaaaggaagaaaaaaggccuugaauugaca

SEQ ID NO: 2110 - RNA, 30 nt, Artificial Sequence
  Synthetic Construct
aauguaucaauuggaaaggaagaaaaaagg

SEQ ID NO: 2111 - RNA, 30 nt, Artificial Sequence
  Synthetic Construct
uuuuuuaaacuuagacagcauguaugguau

SEQ ID NO: 2112 - RNA, 30 nt, Artificial Sequence
  Synthetic Construct
uuuuuaaacuuagacagcauguaugguaug

SEQ ID NO: 2113 - RNA, 30 nt, Artificial Sequence
  Synthetic Construct
uuuuaaacuuagacagcauguaugguaugu

SEQ ID NO: 2114 - RNA, 30 nt, Artificial Sequence
  Synthetic Construct
uuuaaacuuagacagcauguaugguauguu

SEQ ID NO: 2115 - RNA, 30 nt, Artificial Sequence
  Synthetic Construct
uuaaacuuagacagcauguaugguauguua

SEQ ID NO: 2116 - RNA, 30 nt, Artificial Sequence
  Synthetic Construct
uaaacuuagacagcauguaugguauguuau

SEQ ID NO: 2117 - RNA, 30 nt, Artificial Sequence
  Synthetic Construct
aaacuuagacagcauguaugguauguuaug

SEQ ID NO: 2118 - RNA, 30 nt, Artificial Sequence
  Synthetic Construct
aacuuagacagcauguaugguauguuaugg

SEQ ID NO: 2119 - RNA, 30 nt, Artificial Sequence
  Synthetic Construct
gacagcauguaugguauguuauggcuauuu

SEQ ID NO: 2120 - RNA, 30 nt, Artificial Sequence
  Synthetic Construct
uggcuauuuuaaauugucccuaauucguug

SEQ ID NO: 2121 - RNA, 30 nt, Artificial Sequence
  Synthetic Construct
uaaauugucccuaauucguugcugagcaaa

SEQ ID NO: 2122 - RNA, 30 nt, Artificial Sequence
  Synthetic Construct
aaauugucccuaauucguugcugagcaaac

SEQ ID NO: 2123 - RNA, 30 nt, Artificial Sequence
  Synthetic Construct
aauugucccuaauucguugcugagcaaaca

SEQ ID NO: 2124 - RNA, 30 nt, Artificial Sequence
  Synthetic Construct
ucccuaauucguugcugagcaaacauguug

SEQ ID NO: 2125 - RNA, 30 nt, Artificial Sequence
  Synthetic Construct
guugcugagcaaacauguugcuguuuccag

SEQ ID NO: 2126 - RNA, 30 nt, Artificial Sequence
  Synthetic Construct
cugagcaaacauguugcuguuuccaguucc

SEQ ID NO: 2127 - RNA, 30 nt, Artificial Sequence
  Synthetic Construct
cuguuuccaguuccguucugagagaaaaag

SEQ ID NO: 2128 - RNA, 30 nt, Artificial Sequence
  Synthetic Construct
acccucuauagacagaauagauagcacuga

SEQ ID NO: 2129 - RNA, 30 nt, Artificial Sequence
  Synthetic Construct
gauuaacccucuauagacagaauagauagc

SEQ ID NO: 2130 - RNA, 30 nt, Artificial Sequence
  Synthetic Construct
ggauuaacccucuauagacagaauagauag

SEQ ID NO: 2131 - RNA, 30 nt, Artificial Sequence
  Synthetic Construct
uaacgugaggaggaaaaacagucuuuggau

SEQ ID NO: 2132 - RNA, 30 nt, Artificial Sequence
  Synthetic Construct
auaacgugaggaggaaaaacagucuuugga

SEQ ID NO: 2133 - RNA, 30 nt, Artificial Sequence
  Synthetic Construct
uauaacgugaggaggaaaaacagucuuugg

SEQ ID NO: 2134 - RNA, 30 nt, Artificial Sequence
  Synthetic Construct
cuuuaguuuaauuuuauaaacaaaacugau

SEQ ID NO: 2135 - RNA, 30 nt, Artificial Sequence
  Synthetic Construct
uuuuauaacgugaggaggaaaaacagucuu

SEQ ID NO: 2136 - RNA, 30 nt, Artificial Sequence
  Synthetic Construct
uauuuuauaacgugaggaggaaaaacaguc

SEQ ID NO: 2137 - RNA, 30 nt, Artificial Sequence
  Synthetic Construct
uguaauacauaucauguacaguuuuauuuu

SEQ ID NO: 2138 - RNA, 30 nt, Artificial Sequence
  Synthetic Construct
ugagagaaaaagagagagagagagaaaaag

SEQ ID NO: 2139 - RNA, 30 nt, Artificial Sequence
  Synthetic Construct
cguucugagagaaaaagagagagagagaga

SEQ ID NO: 2140 - RNA, 30 nt, Artificial Sequence
  Synthetic Construct
caguuccguucugagagaaaaagagagaga

SEQ ID NO: 2141 - RNA, 30 nt, Artificial Sequence
  Synthetic Construct
ccaguuccguucugagagaaaaagagagag

SEQ ID NO: 2142 - RNA, 30 nt, Artificial Sequence
  Synthetic Construct
auuuuauaacgugaggaggaaaaacagucu

SEQ ID NO: 2143 - RNA, 30 nt, Artificial Sequence
  Synthetic Construct
aguuuaauuuuauaaacaaaacugauuaua

SEQ ID NO: 2144 - RNA, 30 nt, Artificial Sequence
  Synthetic Construct
guuuaauuuuauaaacaaaacugauuauac

SEQ ID NO: 2145 - RNA, 30 nt, Artificial Sequence
  Synthetic Construct
aauuuuauaaacaaaacugauuauaccagu

SEQ ID NO: 2146 - RNA, 30 nt, Artificial Sequence
  Synthetic Construct
aaaauacuggcaccaaaagaaauagaucca

SEQ ID NO: 2147 - RNA, 30 nt, Artificial Sequence
  Synthetic Construct
guugucaaguggacaaucaaaugauaaacu

SEQ ID NO: 2148 - RNA, 30 nt, Artificial Sequence
  Synthetic Construct
ucaaguggacaaucaaaugauaaacuuuaa

SEQ ID NO: 2149 - RNA, 30 nt, Artificial Sequence
  Synthetic Construct
aagaccuuguauaccauauugaaaggaaga

SEQ ID NO: 2150 - RNA, 30 nt, Artificial Sequence
  Synthetic Construct
agaccuuguauaccauauugaaaggaagag

SEQ ID NO: 2151 - RNA, 30 nt, Artificial Sequence
  Synthetic Construct
uauaccauauugaaaggaagaggcugacaa

SEQ ID NO: 2152 - RNA, 30 nt, Artificial Sequence
  Synthetic Construct
aaaggaagaggcugacaauaagguuugaca

SEQ ID NO: 2153 - RNA, 30 nt, Artificial Sequence
  Synthetic Construct
gacagaggggaacagaagaaaauaauauga

SEQ ID NO: 2154 - RNA, 30 nt, Artificial Sequence
  Synthetic Construct
acagaggggaacagaagaaaauaauaugau

SEQ ID NO: 2155 - RNA, 30 nt, Artificial Sequence
  Synthetic Construct
auuagcacaacgugguacuauuugccauuu

SEQ ID NO: 2156 - RNA, 30 nt, Artificial Sequence
  Synthetic Construct
uuagcacaacgugguacuauuugccauuua

SEQ ID NO: 2157 - RNA, 30 nt, Artificial Sequence
  Synthetic Construct
gcacaacgugguacuauuugccauuuaaaa

SEQ ID NO: 2158 - RNA, 30 nt, Artificial Sequence
  Synthetic Construct
gccauuuaaaacuagaacagguauauaagc

SEQ ID NO: 2159 - RNA, 30 nt, Artificial Sequence
  Synthetic Construct
ccauuuaaaacuagaacagguauauaagcu

SEQ ID NO: 2160 - RNA, 30 nt, Artificial Sequence
  Synthetic Construct
aaaacuagaacagguauauaagcuaauauu

SEQ ID NO: 2161 - RNA, 30 nt, Artificial Sequence
  Synthetic Construct
aaacuagaacagguauauaagcuaauauug

SEQ ID NO: 2162 - RNA, 30 nt, Artificial Sequence
  Synthetic Construct
auacaaugaugauuaacuaugaauucuuaa

SEQ ID NO: 2163 - RNA, 30 nt, Artificial Sequence
  Synthetic Construct
cuuuuccauacacugugugcuauuuguguu

SEQ ID NO: 2164 - RNA, 30 nt, Artificial Sequence
  Synthetic Construct
auuucuuuuccauacacugugugcuauuug

SEQ ID NO: 2165 - RNA, 30 nt, Artificial Sequence
  Synthetic Construct
uacuucauuucuuuuccauacacugugugc

SEQ ID NO: 2166 - RNA, 30 nt, Artificial Sequence
  Synthetic Construct
agaguagcaguauauaugucugugcucccu

SEQ ID NO: 2167 - RNA, 30 nt, Artificial Sequence
  Synthetic Construct
aagaguagcaguauauaugucugugcuccc

SEQ ID NO: 2168 - RNA, 30 nt, Artificial Sequence
  Synthetic Construct
uaagaguagcaguauauaugucugugcucc

SEQ ID NO: 2169 - RNA, 30 nt, Artificial Sequence
  Synthetic Construct
aaaaauacuggcaccaaaagaaauagaucc

SEQ ID NO: 2170 - RNA, 30 nt, Artificial Sequence
  Synthetic Construct
aaaaaagaagagaaagaauuuuaagaguag

SEQ ID NO: 2171 - RNA, 30 nt, Artificial Sequence
  Synthetic Construct
aaugugacauucuuaaaaaaagaagagaaa

SEQ ID NO: 2172 - RNA, 30 nt, Artificial Sequence
  Synthetic Construct
aaaugugacauucuuaaaaaaagaagagaa

SEQ ID NO: 2173 - RNA, 30 nt, Artificial Sequence
  Synthetic Construct
cauuuaaaugugacauucuuaaaaaaagaa

SEQ ID NO: 2174 - RNA, 30 nt, Artificial Sequence
  Synthetic Construct
agacuugcauuuaaaugugacauucuuaaa

SEQ ID NO: 2175 - RNA, 30 nt, Artificial Sequence
  Synthetic Construct
uuaagacuugcauuuaaaugugacauucuu

SEQ ID NO: 2176 - RNA, 30 nt, Artificial Sequence
  Synthetic Construct
acuaugaauucuuaagacuugcauuuaaau

SEQ ID NO: 2177 - RNA, 30 nt, Artificial Sequence
  Synthetic Construct
uuaaaaaaagaagagaaagaauuuuaagag

SEQ ID NO: 2178 - RNA, 30 nt, Artificial Sequence
  Synthetic Construct
uguauguuuuuuuuuaaacuuagacagcau

SEQ ID NO: 2179 - RNA, 30 nt, Artificial Sequence
  Synthetic Construct
uaaaaauacuggcaccaaaagaaauagauc

SEQ ID NO: 2180 - RNA, 30 nt, Artificial Sequence
  Synthetic Construct
auaaugucuuuuuaaaaauacuggcaccaa

SEQ ID NO: 2181 - RNA, 30 nt, Artificial Sequence
  Synthetic Construct
auuuuauaaacaaaacugauuauaccagua

SEQ ID NO: 2182 - RNA, 30 nt, Artificial Sequence
  Synthetic Construct
uauaaacaaaacugauuauaccaguauaaa

SEQ ID NO: 2183 - RNA, 30 nt, Artificial Sequence
  Synthetic Construct
auaaacaaaacugauuauaccaguauaaaa

SEQ ID NO: 2184 - RNA, 30 nt, Artificial Sequence
  Synthetic Construct
uaaacaaaacugauuauaccaguauaaaag

SEQ ID NO: 2185 - RNA, 30 nt, Artificial Sequence
  Synthetic Construct
uaccaguauaaaagcuacuuugcuccuggu

SEQ ID NO: 2186 - RNA, 30 nt, Artificial Sequence
  Synthetic Construct
gcuccuggugagagcuuaaaagaaaugggc

SEQ ID NO: 2187 - RNA, 30 nt, Artificial Sequence
  Synthetic Construct
cuccuggugagagcuuaaaagaaaugggcu

SEQ ID NO: 2188 - RNA, 30 nt, Artificial Sequence
  Synthetic Construct
aaagaaaugggcuguuuugcccaaaguuuu

SEQ ID NO: 2189 - RNA, 30 nt, Artificial Sequence
  Synthetic Construct
ugcccaaaguuuuauuuuuuuuaaacaaug

SEQ ID NO: 2190 - RNA, 30 nt, Artificial Sequence
  Synthetic Construct
gcccaaaguuuuauuuuuuuuaaacaauga

SEQ ID NO: 2191 - RNA, 30 nt, Artificial Sequence
  Synthetic Construct
cccaaaguuuuauuuuuuuuaaacaaugau

SEQ ID NO: 2192 - RNA, 30 nt, Artificial Sequence
  Synthetic Construct
uauuuuuuuuaaacaaugauuaaauugaau

SEQ ID NO: 2193 - RNA, 30 nt, Artificial Sequence
  Synthetic Construct
auuuuuuuuaaacaaugauuaaauugaaug

SEQ ID NO: 2194 - RNA, 30 nt, Artificial Sequence
  Synthetic Construct
uuuuuuuuaaacaaugauuaaauugaaugu

SEQ ID NO: 2195 - RNA, 30 nt, Artificial Sequence
  Synthetic Construct
uuuuuaaacaaugauuaaauugaaugugua

SEQ ID NO: 2196 - RNA, 30 nt, Artificial Sequence
  Synthetic Construct
uuuuaaacaaugauuaaauugaauguguaa

SEQ ID NO: 2197 - RNA, 30 nt, Artificial Sequence
  Synthetic Construct
uuuaaacaaugauuaaauugaauguguaau

SEQ ID NO: 2198 - RNA, 30 nt, Artificial Sequence
  Synthetic Construct
aauaaugucuuuuuaaaaauacuggcacca

SEQ ID NO: 2199 - RNA, 30 nt, Artificial Sequence
  Synthetic Construct
cuuuaauaaugucuuuuuaaaaauacuggc

SEQ ID NO: 2200 - RNA, 30 nt, Artificial Sequence
  Synthetic Construct
gcuuuaauaaugucuuuuuaaaaauacugg

SEQ ID NO: 2201 - RNA, 30 nt, Artificial Sequence
  Synthetic Construct
ugaagauauuugcuuuaauaaugucuuuuu

SEQ ID NO: 2202 - RNA, 30 nt, Artificial Sequence
  Synthetic Construct
augaagauauuugcuuuaauaaugucuuuu

SEQ ID NO: 2203 - RNA, 30 nt, Artificial Sequence
  Synthetic Construct
uaugaagauauuugcuuuaauaaugucuuu

SEQ ID NO: 2204 - RNA, 30 nt, Artificial Sequence
  Synthetic Construct
uuaaaaauacuggcaccaaaagaaauagau

SEQ ID NO: 2205 - RNA, 30 nt, Artificial Sequence
  Synthetic Construct
auuuuaugaagauauuugcuuuaauaaugu

SEQ ID NO: 2206 - RNA, 30 nt, Artificial Sequence
  Synthetic Construct
aauguguaaugugcaaaagcccuggaacgc

SEQ ID NO: 2207 - RNA, 30 nt, Artificial Sequence
  Synthetic Construct
aauugaauguguaaugugcaaaagcccugg

SEQ ID NO: 2208 - RNA, 30 nt, Artificial Sequence
  Synthetic Construct
aacaaugauuaaauugaauguguaaugugc

SEQ ID NO: 2209 - RNA, 30 nt, Artificial Sequence
  Synthetic Construct
aaacaaugauuaaauugaauguguaaugug

SEQ ID NO: 2210 - RNA, 30 nt, Artificial Sequence
  Synthetic Construct
uaaacaaugauuaaauugaauguguaaugu

SEQ ID NO: 2211 - RNA, 30 nt, Artificial Sequence
  Synthetic Construct
uuaaacaaugauuaaauugaauguguaaug

SEQ ID NO: 2212 - RNA, 30 nt, Artificial Sequence
  Synthetic Construct
aauacacuaguaaggaguucauuuuaugaa

SEQ ID NO: 2213 - RNA, 30 nt, Artificial Sequence
  Synthetic Construct
cauguuguguauguuuuuuuuuaaacuuag

SEQ ID NO: 2214 - RNA, 30 nt, Artificial Sequence
  Synthetic Construct
acauguuguguauguuuuuuuuuaaacuua

SEQ ID NO: 2215 - RNA, 30 nt, Artificial Sequence
  Synthetic Construct
ugcaauaauuuacauguuguguauguuuuu

SEQ ID NO: 2216 - RNA, 30 nt, Artificial Sequence
  Synthetic Construct
cagccagguagcaagccgcccuuccuggcg

SEQ ID NO: 2217 - RNA, 30 nt, Artificial Sequence
  Synthetic Construct
cuggcgacgcccccccucccuccucugcaa

SEQ ID NO: 2218 - RNA, 30 nt, Artificial Sequence
  Synthetic Construct
ugcggcaagacguucaaauuucagagcaac

SEQ ID NO: 2219 - RNA, 30 nt, Artificial Sequence
  Synthetic Construct
aaauuucagagcaaccugguggugcaccgg

SEQ ID NO: 2220 - RNA, 30 nt, Artificial Sequence
  Synthetic Construct
cagagcaaccugguggugcaccggcgcagc

SEQ ID NO: 2221 - RNA, 30 nt, Artificial Sequence
  Synthetic Construct
agagcaaccugguggugcaccggcgcagcc

SEQ ID NO: 2222 - RNA, 30 nt, Artificial Sequence
  Synthetic Construct
gugggcagcgccagcagcgcgcucaagucc

SEQ ID NO: 2223 - RNA, 30 nt, Artificial Sequence
  Synthetic Construct
aagagcgagaacgaccccaaccugaucccg

SEQ ID NO: 2224 - RNA, 30 nt, Artificial Sequence
  Synthetic Construct
gggcugagccuggaggcggcgcgccaccac

SEQ ID NO: 2225 - RNA, 30 nt, Artificial Sequence
  Synthetic Construct
agcgaggccuuccaccagguccugggcgag

SEQ ID NO: 2226 - RNA, 30 nt, Artificial Sequence
  Synthetic Construct
caccagguccugggcgagaagcauaagcgc

SEQ ID NO: 2227 - RNA, 30 nt, Artificial Sequence
  Synthetic Construct
cgacgaagacucgguggccggcgagucgga

SEQ ID NO: 2228 - RNA, 30 nt, Artificial Sequence
  Synthetic Construct
auggccgcggcugcuccccgggcgagucgg

SEQ ID NO: 2229 - RNA, 30 nt, Artificial Sequence
  Synthetic Construct
ucuaagcgcaucaagcucgagaaggaguuc

SEQ ID NO: 2230 - RNA, 30 nt, Artificial Sequence
  Synthetic Construct
gaccugcccccggccgcgaugcccaacacg

SEQ ID NO: 2231 - RNA, 30 nt, Artificial Sequence
  Synthetic Construct
cuuagcuucggagacuccagacaaucgccu

SEQ ID NO: 2232 - RNA, 30 nt, Artificial Sequence
  Synthetic Construct
gcuucggagacuccagacaaucgccuuuug

SEQ ID NO: 2233 - RNA, 30 nt, Artificial Sequence
  Synthetic Construct
guaagaugccuuuuagcguguacaguaccc

SEQ ID NO: 2234 - RNA, 30 nt, Artificial Sequence
  Synthetic Construct
caaaugugaaauuuguaagaugccuuuuag

SEQ ID NO: 2235 - RNA, 30 nt, Artificial Sequence
  Synthetic Construct
acaaaugugaaauuuguaagaugccuuuua

SEQ ID NO: 2236 - RNA, 30 nt, Artificial Sequence
  Synthetic Construct
uaaaugcgagcugugcaacuaugccugugc

SEQ ID NO: 2237 - RNA, 30 nt, Artificial Sequence
  Synthetic Construct
aagaacuguagcaaucucacuguccacagg

SEQ ID NO: 2238 - RNA, 30 nt, Artificial Sequence
  Synthetic Construct
ugaguacugugggaaagucuucaagaacug

SEQ ID NO: 2239 - RNA, 30 nt, Artificial Sequence
  Synthetic Construct
cugcaaccauuccagccagguagcaagccg

SEQ ID NO: 2240 - RNA, 30 nt, Artificial Sequence
  Synthetic Construct
gugguccgggcccgggcaggcccagcucaa

SEQ ID NO: 2241 - RNA, 30 nt, Artificial Sequence
  Synthetic Construct
cgcuucuccacaccgcccggggagcuggac

SEQ ID NO: 2242 - RNA, 30 nt, Artificial Sequence
  Synthetic Construct
gcgcuucuccacaccgcccggggagcugga

SEQ ID NO: 2243 - RNA, 30 nt, Artificial Sequence
  Synthetic Construct
ccuccucgucggagcacuccucggagaacg

SEQ ID NO: 2244 - RNA, 30 nt, Artificial Sequence
  Synthetic Construct
gccuccucgucggagcacuccucggagaac

SEQ ID NO: 2245 - RNA, 30 nt, Artificial Sequence
  Synthetic Construct
ugccuccucgucggagcacuccucggagaa

SEQ ID NO: 2246 - RNA, 30 nt, Artificial Sequence
  Synthetic Construct
ggagacuccagacaaucgccuuuugccucc

SEQ ID NO: 2247 - RNA, 30 nt, Artificial Sequence
  Synthetic Construct
uccacaccgcccggggagcuggacggaggg

SEQ ID NO: 2248 - RNA, 30 nt, Artificial Sequence
  Synthetic Construct
uaagaugccuuuuagcguguacaguacccu

SEQ ID NO: 2249 - RNA, 30 nt, Artificial Sequence
  Synthetic Construct
gagagcuggcagggaacacgucuagcccac

SEQ ID NO: 2250 - RNA, 30 nt, Artificial Sequence
  Synthetic Construct
cucuaggagacuuagagagcuggcagggaa

SEQ ID NO: 2251 - RNA, 30 nt, Artificial Sequence
  Synthetic Construct
aacauugauguugguguuguauuauuuugc

SEQ ID NO: 2252 - RNA, 30 nt, Artificial Sequence
  Synthetic Construct
auguugguguuguauuauuuugcagguaaa

SEQ ID NO: 2253 - RNA, 30 nt, Artificial Sequence
  Synthetic Construct
guguuguauuauuuugcagguaaagaugag

SEQ ID NO: 2254 - RNA, 30 nt, Artificial Sequence
  Synthetic Construct
uauuauuuugcagguaaagaugagcccagc

SEQ ID NO: 2255 - RNA, 30 nt, Artificial Sequence
  Synthetic Construct
uuuugcagguaaagaugagcccagcagcua

SEQ ID NO: 2256 - RNA, 30 nt, Artificial Sequence
  Synthetic Construct
ugcagguaaagaugagcccagcagcuacac

SEQ ID NO: 2257 - RNA, 30 nt, Artificial Sequence
  Synthetic Construct
gcagguaaagaugagcccagcagcuacaca

SEQ ID NO: 2258 - RNA, 30 nt, Artificial Sequence
  Synthetic Construct
cagguaaagaugagcccagcagcuacacau

SEQ ID NO: 2259 - RNA, 30 nt, Artificial Sequence
  Synthetic Construct
caaacagccauucaccagugcaugguuucu

SEQ ID NO: 2260 - RNA, 30 nt, Artificial Sequence
  Synthetic Construct
accagugcaugguuucucuugcaacacgca

SEQ ID NO: 2261 - RNA, 30 nt, Artificial Sequence
  Synthetic Construct
cucuugcaacacgcacagaacacucaugga

SEQ ID NO: 2262 - RNA, 30 nt, Artificial Sequence
  Synthetic Construct
ucuugcaacacgcacagaacacucauggau

SEQ ID NO: 2263 - RNA, 30 nt, Artificial Sequence
  Synthetic Construct
caacacgcacagaacacucauggauuaaga

SEQ ID NO: 2264 - RNA, 30 nt, Artificial Sequence
  Synthetic Construct
agaaucuacuuagaaagcgaacacggaagu

SEQ ID NO: 2265 - RNA, 30 nt, Artificial Sequence
  Synthetic Construct
gaaagcgaacacggaaguccccugaccccg

SEQ ID NO: 2266 - RNA, 30 nt, Artificial Sequence
  Synthetic Construct
guaucccuucaggacuaggugcagaauguc

SEQ ID NO: 2267 - RNA, 30 nt, Artificial Sequence
  Synthetic Construct
aggacuaggugcagaauguccuucccagcc

SEQ ID NO: 2268 - RNA, 30 nt, Artificial Sequence
  Synthetic Construct
aauccaauggcuauggagccucccgccaug

SEQ ID NO: 2269 - RNA, 30 nt, Artificial Sequence
  Synthetic Construct
acagggugcugcgguugaauccaauggcua

SEQ ID NO: 2270 - RNA, 30 nt, Artificial Sequence
  Synthetic Construct
gacagggugcugcgguugaauccaauggcu

SEQ ID NO: 2271 - RNA, 30 nt, Artificial Sequence
  Synthetic Construct
gacccccaccgcauagagcgccugggggcg

SEQ ID NO: 2272 - RNA, 30 nt, Artificial Sequence
  Synthetic Construct
guccaccaccgagacaucacuuggaccccc

SEQ ID NO: 2273 - RNA, 30 nt, Artificial Sequence
  Synthetic Construct
aguccaccaccgagacaucacuuggacccc

SEQ ID NO: 2274 - RNA, 30 nt, Artificial Sequence
  Synthetic Construct
ucuaggagacuuagagagcuggcagggaac

SEQ ID NO: 2275 - RNA, 30 nt, Artificial Sequence
  Synthetic Construct
cacccacucccccccuguuuaguccaccac

SEQ ID NO: 2276 - RNA, 30 nt, Artificial Sequence
  Synthetic Construct
cggccuggcagaagggcgcuuuccacccac

SEQ ID NO: 2277 - RNA, 30 nt, Artificial Sequence
  Synthetic Construct
accugcuaagaauaccaggaucaguaucga

SEQ ID NO: 2278 - RNA, 30 nt, Artificial Sequence
  Synthetic Construct
aaccugcuaagaauaccaggaucaguaucg

SEQ ID NO: 2279 - RNA, 30 nt, Artificial Sequence
  Synthetic Construct
cagacaauaaccccuuuaaccugcuaagaa

SEQ ID NO: 2280 - RNA, 30 nt, Artificial Sequence
  Synthetic Construct
auauugcagacaauaaccccuuuaaccugc

SEQ ID NO: 2281 - RNA, 30 nt, Artificial Sequence
  Synthetic Construct
ccagccaccucuccaugggauucauauugc

SEQ ID NO: 2282 - RNA, 30 nt, Artificial Sequence
  Synthetic Construct
ccacccacucccccccuguuuaguccacca

SEQ ID NO: 2283 - RNA, 30 nt, Artificial Sequence
  Synthetic Construct
uuuuccauacacugugugcuauuuguguua

SEQ ID NO: 2284 - RNA, 30 nt, Artificial Sequence
  Synthetic Construct
uagcguguacaguacccuggagaaacacau

SEQ ID NO: 2285 - RNA, 30 nt, Artificial Sequence
  Synthetic Construct
gcguguacaguacccuggagaaacacauga

SEQ ID NO: 2286 - RNA, 30 nt, Artificial Sequence
  Synthetic Construct
uuuuuccuuuuuuuuuuuuuuccuuuaugu

SEQ ID NO: 2287 - RNA, 30 nt, Artificial Sequence
  Synthetic Construct
uuccuuuuuuuuuuuuuuccuuuauguucu

SEQ ID NO: 2288 - RNA, 30 nt, Artificial Sequence
  Synthetic Construct
uccuuuuuuuuuuuuuuccuuuauguucuc

SEQ ID NO: 2289 - RNA, 30 nt, Artificial Sequence
  Synthetic Construct
ccuuuuuuuuuuuuuuccuuuauguucuca

SEQ ID NO: 2290 - RNA, 30 nt, Artificial Sequence
  Synthetic Construct
cuuuuuuuuuuuuuuccuuuauguucucac

SEQ ID NO: 2291 - RNA, 30 nt, Artificial Sequence
  Synthetic Construct
uuuuuuuuuuuccuuuauguucucaccguu

SEQ ID NO: 2292 - RNA, 30 nt, Artificial Sequence
  Synthetic Construct
uuuuuuuuuuccuuuauguucucaccguuu

SEQ ID NO: 2293 - RNA, 30 nt, Artificial Sequence
  Synthetic Construct
uuuuuuuuuccuuuauguucucaccguuug

SEQ ID NO: 2294 - RNA, 30 nt, Artificial Sequence
  Synthetic Construct
uuuuuuuuccuuuauguucucaccguuuga

SEQ ID NO: 2295 - RNA, 30 nt, Artificial Sequence
  Synthetic Construct
uuuuuuuccuuuauguucucaccguuugaa

SEQ ID NO: 2296 - RNA, 30 nt, Artificial Sequence
  Synthetic Construct
uuuuuuccuuuauguucucaccguuugaau

SEQ ID NO: 2297 - RNA, 30 nt, Artificial Sequence
  Synthetic Construct
uuuuuccuuuauguucucaccguuugaaug

SEQ ID NO: 2298 - RNA, 30 nt, Artificial Sequence
  Synthetic Construct
uuuuccuuuauguucucaccguuugaaugc

SEQ ID NO: 2299 - RNA, 30 nt, Artificial Sequence
  Synthetic Construct
uuuccuuuauguucucaccguuugaaugca

SEQ ID NO: 2300 - RNA, 30 nt, Artificial Sequence
  Synthetic Construct
uuccuuuauguucucaccguuugaaugcau

SEQ ID NO: 2301 - RNA, 30 nt, Artificial Sequence
  Synthetic Construct
uccuuuauguucucaccguuugaaugcaug

SEQ ID NO: 2302 - RNA, 30 nt, Artificial Sequence
  Synthetic Construct
ccuuuauguucucaccguuugaaugcauga

SEQ ID NO: 2303 - RNA, 30 nt, Artificial Sequence
  Synthetic Construct
ucuugugcaauaauuuacauguuguguaug

SEQ ID NO: 2304 - RNA, 30 nt, Artificial Sequence
  Synthetic Construct
cucuugugcaauaauuuacauguuguguau

SEQ ID NO: 2305 - RNA, 30 nt, Artificial Sequence
  Synthetic Construct
agccuuucucuugugcaauaauuuacaugu

SEQ ID NO: 2306 - RNA, 30 nt, Artificial Sequence
  Synthetic Construct
gagccuuucucuugugcaauaauuuacaug

SEQ ID NO: 2307 - RNA, 30 nt, Artificial Sequence
  Synthetic Construct
cgcaaacuuugagccuuucucuugugcaau

SEQ ID NO: 2308 - RNA, 30 nt, Artificial Sequence
  Synthetic Construct
acgcaaacuuugagccuuucucuugugcaa

SEQ ID NO: 2309 - RNA, 30 nt, Artificial Sequence
  Synthetic Construct
cuuuuuccuuuuuuuuuuuuuuccuuuaug

SEQ ID NO: 2310 - RNA, 30 nt, Artificial Sequence
  Synthetic Construct
uacgcaaacuuugagccuuucucuugugca

SEQ ID NO: 2311 - RNA, 30 nt, Artificial Sequence
  Synthetic Construct
aaugcaugaucuguauggggcaauacuauu

SEQ ID NO: 2312 - RNA, 30 nt, Artificial Sequence
  Synthetic Construct
gaaugcaugaucuguauggggcaauacuau

SEQ ID NO: 2313 - RNA, 30 nt, Artificial Sequence
  Synthetic Construct
ucaccguuugaaugcaugaucuguaugggg

SEQ ID NO: 2314 - RNA, 30 nt, Artificial Sequence
  Synthetic Construct
uguucucaccguuugaaugcaugaucugua

SEQ ID NO: 2315 - RNA, 30 nt, Artificial Sequence
  Synthetic Construct
auguucucaccguuugaaugcaugaucugu

SEQ ID NO: 2316 - RNA, 30 nt, Artificial Sequence
  Synthetic Construct
cuuuauguucucaccguuugaaugcaugau

SEQ ID NO: 2317 - RNA, 30 nt, Artificial Sequence
  Synthetic Construct
cauuuuacgcaaacuuugagccuuucucuu

SEQ ID NO: 2318 - RNA, 30 nt, Artificial Sequence
  Synthetic Construct
agcguguacaguacccuggagaaacacaug

SEQ ID NO: 2319 - RNA, 30 nt, Artificial Sequence
  Synthetic Construct
ucuuuuuccuuuuuuuuuuuuuuccuuuau

SEQ ID NO: 2320 - RNA, 30 nt, Artificial Sequence
  Synthetic Construct
uuucuuuuuccuuuuuuuuuuuuuuccuuu

SEQ ID NO: 2321 - RNA, 30 nt, Artificial Sequence
  Synthetic Construct
aauaaugauauaaaaacugaauagagguau

SEQ ID NO: 2322 - RNA, 30 nt, Artificial Sequence
  Synthetic Construct
auaccccucccucacucccaccugacaccc

SEQ ID NO: 2323 - RNA, 30 nt, Artificial Sequence
  Synthetic Construct
uucaccacuccccuuccccaucgcccucca

SEQ ID NO: 2324 - RNA, 30 nt, Artificial Sequence
  Synthetic Construct
ucaccacuccccuuccccaucgcccuccag

SEQ ID NO: 2325 - RNA, 30 nt, Artificial Sequence
  Synthetic Construct
caccacuccccuuccccaucgcccuccagc

SEQ ID NO: 2326 - RNA, 30 nt, Artificial Sequence
  Synthetic Construct
accacuccccuuccccaucgcccuccagcc

SEQ ID NO: 2327 - RNA, 30 nt, Artificial Sequence
  Synthetic Construct
cccaucgcccuccagccccacucccuguag

SEQ ID NO: 2328 - RNA, 30 nt, Artificial Sequence
  Synthetic Construct
uuuucuagucccaugugauuuaaacaaaca

SEQ ID NO: 2329 - RNA, 30 nt, Artificial Sequence
  Synthetic Construct
uuucuagucccaugugauuuaaacaaacaa

SEQ ID NO: 2330 - RNA, 30 nt, Artificial Sequence
  Synthetic Construct
uucuagucccaugugauuuaaacaaacaaa

SEQ ID NO: 2331 - RNA, 30 nt, Artificial Sequence
  Synthetic Construct
ucuagucccaugugauuuaaacaaacaaac

SEQ ID NO: 2332 - RNA, 30 nt, Artificial Sequence
  Synthetic Construct
cuagucccaugugauuuaaacaaacaaaca

SEQ ID NO: 2333 - RNA, 30 nt, Artificial Sequence
  Synthetic Construct
uagucccaugugauuuaaacaaacaaacaa

SEQ ID NO: 2334 - RNA, 30 nt, Artificial Sequence
  Synthetic Construct
aaacaaacaaacaaacaaacagaaguaacg

SEQ ID NO: 2335 - RNA, 30 nt, Artificial Sequence
  Synthetic Construct
aacaaacaaacaaacaaacagaaguaacga

SEQ ID NO: 2336 - RNA, 30 nt, Artificial Sequence
  Synthetic Construct
ucaccagcacaccuguuuuuuuucuuuuuc

SEQ ID NO: 2337 - RNA, 30 nt, Artificial Sequence
  Synthetic Construct
uuuuucuuuuucuuuuucuuuuuucuuuuu

SEQ ID NO: 2338 - RNA, 30 nt, Artificial Sequence
  Synthetic Construct
uuuuuucuuuuuccuuuuuuuuuuuuuucc

SEQ ID NO: 2339 - RNA, 30 nt, Artificial Sequence
  Synthetic Construct
cuuuuuucuuuuuccuuuuuuuuuuuuuuc

SEQ ID NO: 2340 - RNA, 30 nt, Artificial Sequence
  Synthetic Construct
ucuuuuuucuuuuuccuuuuuuuuuuuuuu

SEQ ID NO: 2341 - RNA, 30 nt, Artificial Sequence
  Synthetic Construct
uucuuuuuucuuuuuccuuuuuuuuuuuuu

SEQ ID NO: 2342 - RNA, 30 nt, Artificial Sequence
  Synthetic Construct
uuuuucuuuuuucuuuuuccuuuuuuuuuu

SEQ ID NO: 2343 - RNA, 30 nt, Artificial Sequence
  Synthetic Construct
cuuuuucuuuuuucuuuuuccuuuuuuuuu

SEQ ID NO: 2344 - RNA, 30 nt, Artificial Sequence
  Synthetic Construct
uucuuuuuccuuuuuuuuuuuuuuccuuua

SEQ ID NO: 2345 - RNA, 30 nt, Artificial Sequence
  Synthetic Construct
ucuuuuucuuuuuucuuuuuccuuuuuuuu

SEQ ID NO: 2346 - RNA, 30 nt, Artificial Sequence
  Synthetic Construct
uuuuucuuuuucuuuuuucuuuuuccuuuu

SEQ ID NO: 2347 - RNA, 30 nt, Artificial Sequence
  Synthetic Construct
cuuuuucuuuuucuuuuuucuuuuuccuuu

SEQ ID NO: 2348 - RNA, 30 nt, Artificial Sequence
  Synthetic Construct
ucuuuuucuuuuucuuuuuucuuuuuccuu

SEQ ID NO: 2349 - RNA, 30 nt, Artificial Sequence
  Synthetic Construct
uucuuuuucuuuuucuuuuuucuuuuuccu

SEQ ID NO: 2350 - RNA, 30 nt, Artificial Sequence
  Synthetic Construct
uuucuuuuucuuuuucuuuuuucuuuuucc

SEQ ID NO: 2351 - RNA, 30 nt, Artificial Sequence
  Synthetic Construct
uuuucuuuuucuuuuucuuuuuucuuuuuc

SEQ ID NO: 2352 - RNA, 30 nt, Artificial Sequence
  Synthetic Construct
uucuuuuucuuuuuucuuuuuccuuuuuuu

SEQ ID NO: 2353 - RNA, 30 nt, Artificial Sequence
  Synthetic Construct
uuuggcaguugucugcauuaaccuguucau

SEQ ID NO: 2354 - RNA, 30 nt, Artificial Sequence
  Synthetic Construct
uccauacacugugugcuauuuguguuaaca

SEQ ID NO: 2355 - RNA, 30 nt, Artificial Sequence
  Synthetic Construct
cauacacugugugcuauuuguguuaacaug

SEQ ID NO: 2356 - RNA, 30 nt, Artificial Sequence
  Synthetic Construct
gucccuuuccuucuaucacccuacauucca

SEQ ID NO: 2357 - RNA, 30 nt, Artificial Sequence
  Synthetic Construct
ucccuuuccuucuaucacccuacauuccag

SEQ ID NO: 2358 - RNA, 30 nt, Artificial Sequence
  Synthetic Construct
ccuucuaucacccuacauuccagcaucuua

SEQ ID NO: 2359 - RNA, 30 nt, Artificial Sequence
  Synthetic Construct
accugcaaaauaauacaacaccaacaucaa

SEQ ID NO: 2360 - RNA, 30 nt, Artificial Sequence
  Synthetic Construct
uaucacccuacauuccagcaucuuaccuuc

SEQ ID NO: 2361 - RNA, 30 nt, Artificial Sequence
  Synthetic Construct
cagcaucuuaccuucauaugcaguaaaaga

SEQ ID NO: 2362 - RNA, 30 nt, Artificial Sequence
  Synthetic Construct
ccuucauaugcaguaaaagaaagaaagaaa

SEQ ID NO: 2363 - RNA, 30 nt, Artificial Sequence
  Synthetic Construct
auaugcaguaaaagaaagaaagaaaaaaaa

SEQ ID NO: 2364 - RNA, 30 nt, Artificial Sequence
  Synthetic Construct
ugcaguuuuuuucauugccaaaaacuaaau

SEQ ID NO: 2365 - RNA, 30 nt, Artificial Sequence
  Synthetic Construct
gcaguuuuuuucauugccaaaaacuaaaug

SEQ ID NO: 2366 - RNA, 30 nt, Artificial Sequence
  Synthetic Construct
caguuuuuuucauugccaaaaacuaaaugg

SEQ ID NO: 2367 - RNA, 30 nt, Artificial Sequence
  Synthetic Construct
uuuucauugccaaaaacuaaauggugcuuu

SEQ ID NO: 2368 - RNA, 30 nt, Artificial Sequence
  Synthetic Construct
uuucauugccaaaaacuaaauggugcuuua

SEQ ID NO: 2369 - RNA, 30 nt, Artificial Sequence
  Synthetic Construct
uucauugccaaaaacuaaauggugcuuuau

SEQ ID NO: 2370 - RNA, 30 nt, Artificial Sequence
  Synthetic Construct
ugucccuuuccuucuaucacccuacauucc

SEQ ID NO: 2371 - RNA, 30 nt, Artificial Sequence
  Synthetic Construct
ucauugccaaaaacuaaauggugcuuuaua

SEQ ID NO: 2372 - RNA, 30 nt, Artificial Sequence
  Synthetic Construct
auugccaaaaacuaaauggugcuuuauauu

SEQ ID NO: 2373 - RNA, 30 nt, Artificial Sequence
  Synthetic Construct
ccaaaaacuaaauggugcuuuauauuuaga

SEQ ID NO: 2374 - RNA, 30 nt, Artificial Sequence
  Synthetic Construct
auauuuagauuggaaagaauuucauaugca

SEQ ID NO: 2375 - RNA, 30 nt, Artificial Sequence
  Synthetic Construct
uauuuagauuggaaagaauuucauaugcaa

SEQ ID NO: 2376 - RNA, 30 nt, Artificial Sequence
  Synthetic Construct
agauuggaaagaauuucauaugcaaagcau

SEQ ID NO: 2377 - RNA, 30 nt, Artificial Sequence
  Synthetic Construct
gauuggaaagaauuucauaugcaaagcaua

SEQ ID NO: 2378 - RNA, 30 nt, Artificial Sequence
  Synthetic Construct
gaaagaauuucauaugcaaagcauauuaaa

SEQ ID NO: 2379 - RNA, 30 nt, Artificial Sequence
  Synthetic Construct
cauaugcaaagcauauuaaagagaaagccc

SEQ ID NO: 2380 - RNA, 30 nt, Artificial Sequence
  Synthetic Construct
auaugcaaagcauauuaaagagaaagcccg

SEQ ID NO: 2381 - RNA, 30 nt, Artificial Sequence
  Synthetic Construct
aagagaaagcccgcuuuagucaauacuuuu

SEQ ID NO: 2382 - RNA, 30 nt, Artificial Sequence
  Synthetic Construct
agucaauacuuuuuuguaaauggcaaugca

SEQ ID NO: 2383 - RNA, 30 nt, Artificial Sequence
  Synthetic Construct
gucaauacuuuuuuguaaauggcaaugcag

SEQ ID NO: 2384 - RNA, 30 nt, Artificial Sequence
  Synthetic Construct
uuuguaaauggcaaugcagaauauuuuguu

SEQ ID NO: 2385 - RNA, 30 nt, Artificial Sequence
  Synthetic Construct
uuguaaauggcaaugcagaauauuuuguua

SEQ ID NO: 2386 - RNA, 30 nt, Artificial Sequence
  Synthetic Construct
cauugccaaaaacuaaauggugcuuuauau

SEQ ID NO: 2387 - RNA, 30 nt, Artificial Sequence
  Synthetic Construct
uugucccuuuccuucuaucacccuacauuc

SEQ ID NO: 2388 - RNA, 30 nt, Artificial Sequence
  Synthetic Construct
uguagugugcuuuuugucccuuuccuucua

SEQ ID NO: 2389 - RNA, 30 nt, Artificial Sequence
  Synthetic Construct
uuauguagugugcuuuuugucccuuuccuu

SEQ ID NO: 2390 - RNA, 30 nt, Artificial Sequence
  Synthetic Construct
ugguaguggaaaaaaaaaagacaggcugcc

SEQ ID NO: 2391 - RNA, 30 nt, Artificial Sequence
  Synthetic Construct
gguaguggaaaaaaaaaagacaggcugcca

SEQ ID NO: 2392 - RNA, 30 nt, Artificial Sequence
  Synthetic Construct
guaguggaaaaaaaaaagacaggcugccac

SEQ ID NO: 2393 - RNA, 30 nt, Artificial Sequence
  Synthetic Construct
uuuuaauuuggcaggauaauauagugcaaa

SEQ ID NO: 2394 - RNA, 30 nt, Artificial Sequence
  Synthetic Construct
uuuaauuuggcaggauaauauagugcaaau

SEQ ID NO: 2395 - RNA, 30 nt, Artificial Sequence
  Synthetic Construct
uuaauuuggcaggauaauauagugcaaauu

SEQ ID NO: 2396 - RNA, 30 nt, Artificial Sequence
  Synthetic Construct
uaauuuggcaggauaauauagugcaaauua

SEQ ID NO: 2397 - RNA, 30 nt, Artificial Sequence
  Synthetic Construct
aauuuggcaggauaauauagugcaaauuau

SEQ ID NO: 2398 - RNA, 30 nt, Artificial Sequence
  Synthetic Construct
auuuggcaggauaauauagugcaaauuauu

SEQ ID NO: 2399 - RNA, 30 nt, Artificial Sequence
  Synthetic Construct
ggcaggauaauauagugcaaauuauuugua

SEQ ID NO: 2400 - RNA, 30 nt, Artificial Sequence
  Synthetic Construct
gcaggauaauauagugcaaauuauuuguau

SEQ ID NO: 2401 - RNA, 30 nt, Artificial Sequence
  Synthetic Construct
uuuguaugcuucaaaaaaaaaaaaaagaga

SEQ ID NO: 2402 - RNA, 30 nt, Artificial Sequence
  Synthetic Construct
guaugcuucaaaaaaaaaaaaaagagagaa

SEQ ID NO: 2403 - RNA, 30 nt, Artificial Sequence
  Synthetic Construct
uaugcuucaaaaaaaaaaaaaagagagaaa

SEQ ID NO: 2404 - RNA, 30 nt, Artificial Sequence
  Synthetic Construct
aaaaaaaaaaaaaagagagaaacaaaaaag

SEQ ID NO: 2405 - RNA, 30 nt, Artificial Sequence
  Synthetic Construct
cagaugagaagccauauaauggcgguuugg

SEQ ID NO: 2406 - RNA, 30 nt, Artificial Sequence
  Synthetic Construct
gggggagccugcuagaaugucacauggaug

SEQ ID NO: 2407 - RNA, 30 nt, Artificial Sequence
  Synthetic Construct
guuauguagugugcuuuuugucccuuuccu

SEQ ID NO: 2408 - RNA, 30 nt, Artificial Sequence
  Synthetic Construct
guuuguuauguagugugcuuuuugucccuu

SEQ ID NO: 2409 - RNA, 30 nt, Artificial Sequence
  Synthetic Construct
cugcugccauacuguaugcaguacugcaag

SEQ ID NO: 2410 - RNA, 30 nt, Artificial Sequence
  Synthetic Construct
ccugcugccauacuguaugcaguacugcaa

SEQ ID NO: 2411 - RNA, 30 nt, Artificial Sequence
  Synthetic Construct
uccugcugccauacuguaugcaguacugca

SEQ ID NO: 2412 - RNA, 30 nt, Artificial Sequence
  Synthetic Construct
uuccugcugccauacuguaugcaguacugc

SEQ ID NO: 2413 - RNA, 30 nt, Artificial Sequence
  Synthetic Construct
uguaaauggcaaugcagaauauuuuguuau

SEQ ID NO: 2414 - RNA, 30 nt, Artificial Sequence
  Synthetic Construct
cuuuuuccugcugccauacuguaugcagua

SEQ ID NO: 2415 - RNA, 30 nt, Artificial Sequence
  Synthetic Construct
guuccuuuuuccugcugccauacuguaugc

SEQ ID NO: 2416 - RNA, 30 nt, Artificial Sequence
  Synthetic Construct
uguuccuuuuuccugcugccauacuguaug

SEQ ID NO: 2417 - RNA, 30 nt, Artificial Sequence
  Synthetic Construct
uuguuccuuuuuccugcugccauacuguau

SEQ ID NO: 2418 - RNA, 30 nt, Artificial Sequence
  Synthetic Construct
uuuguuccuuuuuccugcugccauacugua

SEQ ID NO: 2419 - RNA, 30 nt, Artificial Sequence
  Synthetic Construct
uacauauccuuuuuuguuccuuuuuccugc

SEQ ID NO: 2420 - RNA, 30 nt, Artificial Sequence
  Synthetic Construct
ggggagccugcuagaaugucacauggaugg

SEQ ID NO: 2421 - RNA, 30 nt, Artificial Sequence
  Synthetic Construct
uuccuuuuuccugcugccauacuguaugca

SEQ ID NO: 2422 - RNA, 30 nt, Artificial Sequence
  Synthetic Construct
guaaauggcaaugcagaauauuuuguuauu

SEQ ID NO: 2423 - RNA, 30 nt, Artificial Sequence
  Synthetic Construct
uaaauggcaaugcagaauauuuuguuauug

SEQ ID NO: 2424 - RNA, 30 nt, Artificial Sequence
  Synthetic Construct
uguuauuggccuuuucuauuccuguaauga

SEQ ID NO: 2425 - RNA, 30 nt, Artificial Sequence
  Synthetic Construct
uuauuuuuuuuuuuauuuagaugaccaaag

SEQ ID NO: 2426 - RNA, 30 nt, Artificial Sequence
  Synthetic Construct
uauuuuuuuuuuuauuuagaugaccaaagg

SEQ ID NO: 2427 - RNA, 30 nt, Artificial Sequence
  Synthetic Construct
auuuuuuuuuuuauuuagaugaccaaaggu

SEQ ID NO: 2428 - RNA, 30 nt, Artificial Sequence
  Synthetic Construct
uuuuuuuuuuuauuuagaugaccaaagguc

SEQ ID NO: 2429 - RNA, 30 nt, Artificial Sequence
  Synthetic Construct
uuuuuuuuauuuagaugaccaaaggucauu

SEQ ID NO: 2430 - RNA, 30 nt, Artificial Sequence
  Synthetic Construct
uuuuuuuauuuagaugaccaaaggucauua

SEQ ID NO: 2431 - RNA, 30 nt, Artificial Sequence
  Synthetic Construct
uuuuuuauuuagaugaccaaaggucauuac

SEQ ID NO: 2432 - RNA, 30 nt, Artificial Sequence
  Synthetic Construct
uuuuuauuuagaugaccaaaggucauuaca

SEQ ID NO: 2433 - RNA, 30 nt, Artificial Sequence
  Synthetic Construct
uuuuauuuagaugaccaaaggucauuacaa

SEQ ID NO: 2434 - RNA, 30 nt, Artificial Sequence
  Synthetic Construct
uuuauuuagaugaccaaaggucauuacaac

SEQ ID NO: 2435 - RNA, 30 nt, Artificial Sequence
  Synthetic Construct
uuauuuagaugaccaaaggucauuacaacc

SEQ ID NO: 2436 - RNA, 30 nt, Artificial Sequence
  Synthetic Construct
uauuuagaugaccaaaggucauuacaaccu

SEQ ID NO: 2437 - RNA, 30 nt, Artificial Sequence
  Synthetic Construct
auuuagaugaccaaaggucauuacaaccug

SEQ ID NO: 2438 - RNA, 30 nt, Artificial Sequence
  Synthetic Construct
uuuagaugaccaaaggucauuacaaccugg

SEQ ID NO: 2439 - RNA, 30 nt, Artificial Sequence
  Synthetic Construct
agaugaccaaaggucauuacaaccuggcuu

SEQ ID NO: 2440 - RNA, 30 nt, Artificial Sequence
  Synthetic Construct
gaugaccaaaggucauuacaaccuggcuuu

SEQ ID NO: 2441 - RNA, 30 nt, Artificial Sequence
  Synthetic Construct
caaccuggcuuuuuauuguauuuguuucug

SEQ ID NO: 2442 - RNA, 30 nt, Artificial Sequence
  Synthetic Construct
gaaaaaccacugucuguguuuuuuuggcag

SEQ ID NO: 2443 - RNA, 30 nt, Artificial Sequence
  Synthetic Construct
uauuggaaaaaccacugucuguguuuuuuu

SEQ ID NO: 2444 - RNA, 30 nt, Artificial Sequence
  Synthetic Construct
aguucuauuggaaaaaccacugucuguguu

SEQ ID NO: 2445 - RNA, 30 nt, Artificial Sequence
  Synthetic Construct
uuaaguucuauuggaaaaaccacugucugu

SEQ ID NO: 2446 - RNA, 30 nt, Artificial Sequence
  Synthetic Construct
guuaaguucuauuggaaaaaccacugucug

SEQ ID NO: 2447 - RNA, 30 nt, Artificial Sequence
  Synthetic Construct
uggucuuuguuaaguucuauuggaaaaacc

SEQ ID NO: 2448 - RNA, 30 nt, Artificial Sequence
  Synthetic Construct
uuuuuauuuuuuuuuuuauuuagaugacca

SEQ ID NO: 2449 - RNA, 30 nt, Artificial Sequence
  Synthetic Construct
cuggucuuuguuaaguucuauuggaaaaac

SEQ ID NO: 2450 - RNA, 30 nt, Artificial Sequence
  Synthetic Construct
guuucuggucuuuguuaaguucuauuggaa

SEQ ID NO: 2451 - RNA, 30 nt, Artificial Sequence
  Synthetic Construct
uauuuguuucuggucuuuguuaaguucuau

SEQ ID NO: 2452 - RNA, 30 nt, Artificial Sequence
  Synthetic Construct
uuguauuuguuucuggucuuuguuaaguuc

SEQ ID NO: 2453 - RNA, 30 nt, Artificial Sequence
  Synthetic Construct
auuguauuuguuucuggucuuuguuaaguu

SEQ ID NO: 2454 - RNA, 30 nt, Artificial Sequence
  Synthetic Construct
uauuguauuuguuucuggucuuuguuaagu

SEQ ID NO: 2455 - RNA, 30 nt, Artificial Sequence
  Synthetic Construct
uuauuguauuuguuucuggucuuuguuaag

SEQ ID NO: 2456 - RNA, 30 nt, Artificial Sequence
  Synthetic Construct
uuucuggucuuuguuaaguucuauuggaaa

SEQ ID NO: 2457 - RNA, 30 nt, Artificial Sequence
  Synthetic Construct
uugguaguggaaaaaaaaaagacaggcugc

SEQ ID NO: 2458 - RNA, 30 nt, Artificial Sequence
  Synthetic Construct
guuuuuauuuuuuuuuuuauuuagaugacc

SEQ ID NO: 2459 - RNA, 30 nt, Artificial Sequence
  Synthetic Construct
cuuuguuuuuauuuuuuuuuuuauuuagau

SEQ ID NO: 2460 - RNA, 30 nt, Artificial Sequence
  Synthetic Construct
guuauuggccuuuucuauuccuguaaugaa

SEQ ID NO: 2461 - RNA, 30 nt, Artificial Sequence
  Synthetic Construct
uuauuggccuuuucuauuccuguaaugaaa

SEQ ID NO: 2462 - RNA, 30 nt, Artificial Sequence
  Synthetic Construct
uuggccuuuucuauuccuguaaugaaagcu

SEQ ID NO: 2463 - RNA, 30 nt, Artificial Sequence
  Synthetic Construct
gccuuuucuauuccuguaaugaaagcuguu

SEQ ID NO: 2464 - RNA, 30 nt, Artificial Sequence
  Synthetic Construct
ucuauuccuguaaugaaagcuguuugucgu

SEQ ID NO: 2465 - RNA, 30 nt, Artificial Sequence
  Synthetic Construct
cuauuccuguaaugaaagcuguuugucgua

SEQ ID NO: 2466 - RNA, 30 nt, Artificial Sequence
  Synthetic Construct
uauuccuguaaugaaagcuguuugucguaa

SEQ ID NO: 2467 - RNA, 30 nt, Artificial Sequence
  Synthetic Construct
cuguaaugaaagcuguuugucguaacuuga

SEQ ID NO: 2468 - RNA, 30 nt, Artificial Sequence
  Synthetic Construct
gucguaacuugaaauuuuaucuuuuacuau

SEQ ID NO: 2469 - RNA, 30 nt, Artificial Sequence
  Synthetic Construct
ucguaacuugaaauuuuaucuuuuacuaug

SEQ ID NO: 2470 - RNA, 30 nt, Artificial Sequence
  Synthetic Construct
aaauuuuaucuuuuacuaugggagucacua

SEQ ID NO: 2471 - RNA, 30 nt, Artificial Sequence
  Synthetic Construct
uaucuuuuacuaugggagucacuauuuauu

SEQ ID NO: 2472 - RNA, 30 nt, Artificial Sequence
  Synthetic Construct
aucuuuuacuaugggagucacuauuuauua

SEQ ID NO: 2473 - RNA, 30 nt, Artificial Sequence
  Synthetic Construct
ucuuuuacuaugggagucacuauuuauuau

SEQ ID NO: 2474 - RNA, 30 nt, Artificial Sequence
  Synthetic Construct
uacuaugggagucacuauuuauuauugcuu

SEQ ID NO: 2475 - RNA, 30 nt, Artificial Sequence
  Synthetic Construct
acuaugggagucacuauuuauuauugcuua

SEQ ID NO: 2476 - RNA, 30 nt, Artificial Sequence
  Synthetic Construct
cuaugggagucacuauuuauuauugcuuau

SEQ ID NO: 2477 - RNA, 30 nt, Artificial Sequence
  Synthetic Construct
ucuuuguuuuuauuuuuuuuuuuauuuaga

SEQ ID NO: 2478 - RNA, 30 nt, Artificial Sequence
  Synthetic Construct
uucuuuguuuuuauuuuuuuuuuuauuuag

SEQ ID NO: 2479 - RNA, 30 nt, Artificial Sequence
  Synthetic Construct
uuuuucuuuguuuuuauuuuuuuuuuuauu

SEQ ID NO: 2480 - RNA, 30 nt, Artificial Sequence
  Synthetic Construct
auuuuucuuuguuuuuauuuuuuuuuuuau

SEQ ID NO: 2481 - RNA, 30 nt, Artificial Sequence
  Synthetic Construct
uauuuuucuuuguuuuuauuuuuuuuuuua

SEQ ID NO: 2482 - RNA, 30 nt, Artificial Sequence
  Synthetic Construct
aucuuuuauuuuucuuuguuuuuauuuuuu

SEQ ID NO: 2483 - RNA, 30 nt, Artificial Sequence
  Synthetic Construct
uuuguuuuuauuuuuuuuuuuauuuagaug

SEQ ID NO: 2484 - RNA, 30 nt, Artificial Sequence
  Synthetic Construct
gaucuuuuauuuuucuuuguuuuuauuuuu

SEQ ID NO: 2485 - RNA, 30 nt, Artificial Sequence
  Synthetic Construct
aaaacagaggcacuuaauuugaucuuuuau

SEQ ID NO: 2486 - RNA, 30 nt, Artificial Sequence
  Synthetic Construct
ugugcccuguucaaaacagaggcacuuaau

SEQ ID NO: 2487 - RNA, 30 nt, Artificial Sequence
  Synthetic Construct
cuuaugugcccuguucaaaacagaggcacu

SEQ ID NO: 2488 - RNA, 30 nt, Artificial Sequence
  Synthetic Construct
uugcuuaugugcccuguucaaaacagaggc

SEQ ID NO: 2489 - RNA, 30 nt, Artificial Sequence
  Synthetic Construct
uuauugcuuaugugcccuguucaaaacaga

SEQ ID NO: 2490 - RNA, 30 nt, Artificial Sequence
  Synthetic Construct
auuauugcuuaugugcccuguucaaaacag

SEQ ID NO: 2491 - RNA, 30 nt, Artificial Sequence
  Synthetic Construct
auuugaucuuuuauuuuucuuuguuuuuau

SEQ ID NO: 2492 - RNA, 30 nt, Artificial Sequence
  Synthetic Construct
uuugguaguggaaaaaaaaaagacaggcug

SEQ ID NO: 2493 - RNA, 30 nt, Artificial Sequence
  Synthetic Construct
aaagguaucaauguaccuuuuuugguagug

SEQ ID NO: 2494 - RNA, 30 nt, Artificial Sequence
  Synthetic Construct
ucuuaaaagguaucaauguaccuuuuuugg

SEQ ID NO: 2495 - RNA, 30 nt, Artificial Sequence
  Synthetic Construct
ucuaaucagagauacagagguugaguauaa

SEQ ID NO: 2496 - RNA, 30 nt, Artificial Sequence
  Synthetic Construct
aguauaaaauaaaccugcucagauaggaca

SEQ ID NO: 2497 - RNA, 30 nt, Artificial Sequence
  Synthetic Construct
agugcacuguacaauuuucccaguuuacag

SEQ ID NO: 2498 - RNA, 30 nt, Artificial Sequence
  Synthetic Construct
ucccaguuuacaggucuauacuuaagggaa

SEQ ID NO: 2499 - RNA, 30 nt, Artificial Sequence
  Synthetic Construct
cccaguuuacaggucuauacuuaagggaaa

SEQ ID NO: 2500 - RNA, 30 nt, Artificial Sequence
  Synthetic Construct
ccaguuuacaggucuauacuuaagggaaaa

SEQ ID NO: 2501 - RNA, 30 nt, Artificial Sequence
  Synthetic Construct
acaggucuauacuuaagggaaaaguugcaa

SEQ ID NO: 2502 - RNA, 30 nt, Artificial Sequence
  Synthetic Construct
caggucuauacuuaagggaaaaguugcaag

SEQ ID NO: 2503 - RNA, 30 nt, Artificial Sequence
  Synthetic Construct
agggaaaaguugcaagaaugcugaaaaaaa

SEQ ID NO: 2504 - RNA, 30 nt, Artificial Sequence
  Synthetic Construct
caagaaugcugaaaaaaaauugaacacaau

SEQ ID NO: 2505 - RNA, 30 nt, Artificial Sequence
  Synthetic Construct
aacacaaucucauugaggagcauuuuuuaa

SEQ ID NO: 2506 - RNA, 30 nt, Artificial Sequence
  Synthetic Construct
aggagcauuuuuuaaaaacuaaaaaaaaaa

SEQ ID NO: 2507 - RNA, 30 nt, Artificial Sequence
  Synthetic Construct
uuuaaaaacuaaaaaaaaaaaaacuuugcc

SEQ ID NO: 2508 - RNA, 30 nt, Artificial Sequence
  Synthetic Construct
uuaaaaacuaaaaaaaaaaaaacuuugcca

SEQ ID NO: 2509 - RNA, 30 nt, Artificial Sequence
  Synthetic Construct
uaaaaacuaaaaaaaaaaaaacuuugccag

SEQ ID NO: 2510 - RNA, 30 nt, Artificial Sequence
  Synthetic Construct
aaaaacuaaaaaaaaaaaaacuuugccagc

SEQ ID NO: 2511 - RNA, 30 nt, Artificial Sequence
  Synthetic Construct
aaaacuaaaaaaaaaaaaacuuugccagcc

SEQ ID NO: 2512 - RNA, 30 nt, Artificial Sequence
  Synthetic Construct
gcuucuacagugcaaggauuuuuuuguaca

SEQ ID NO: 2513 - RNA, 30 nt, Artificial Sequence
  Synthetic Construct
cgcuucuacagugcaaggauuuuuuuguac

SEQ ID NO: 2514 - RNA, 30 nt, Artificial Sequence
  Synthetic Construct
cuuucgcuucuacagugcaaggauuuuuuu

SEQ ID NO: 2515 - RNA, 30 nt, Artificial Sequence
  Synthetic Construct
acauagaaaugaaugauugcuuucgcuucu

SEQ ID NO: 2516 - RNA, 30 nt, Artificial Sequence
  Synthetic Construct
caagcgcugugaauggaaacagaauacacu

SEQ ID NO: 2517 - RNA, 30 nt, Artificial Sequence
  Synthetic Construct
gacgcaacauugcaagcgcugugaauggaa

SEQ ID NO: 2518 - RNA, 30 nt, Artificial Sequence
  Synthetic Construct
cucuaaucagagauacagagguugaguaua

SEQ ID NO: 2519 - RNA, 30 nt, Artificial Sequence
  Synthetic Construct
cuuggacgcaacauugcaagcgcugugaau

SEQ ID NO: 2520 - RNA, 30 nt, Artificial Sequence
  Synthetic Construct
agcuuacuuacuuggacgcaacauugcaag

SEQ ID NO: 2521 - RNA, 30 nt, Artificial Sequence
  Synthetic Construct
acuauugagcuuacuuacuuggacgcaaca

SEQ ID NO: 2522 - RNA, 30 nt, Artificial Sequence
  Synthetic Construct
cuugacuauugagcuuacuuacuuggacgc

SEQ ID NO: 2523 - RNA, 30 nt, Artificial Sequence
  Synthetic Construct
acuugacuauugagcuuacuuacuuggacg

SEQ ID NO: 2524 - RNA, 30 nt, Artificial Sequence
  Synthetic Construct
ccagccauuuacuugacuauugagcuuacu

SEQ ID NO: 2525 - RNA, 30 nt, Artificial Sequence
  Synthetic Construct
gccagccauuuacuugacuauugagcuuac

SEQ ID NO: 2526 - RNA, 30 nt, Artificial Sequence
  Synthetic Construct
cuuacuuggacgcaacauugcaagcgcugu

SEQ ID NO: 2527 - RNA, 30 nt, Artificial Sequence
  Synthetic Construct
uacagugcaaggauuuuuuuguacaaaacu

SEQ ID NO: 2528 - RNA, 30 nt, Artificial Sequence
  Synthetic Construct
ucucuaaucagagauacagagguugaguau

SEQ ID NO: 2529 - RNA, 30 nt, Artificial Sequence
  Synthetic Construct
aaauagcacuugacucugccugugauaucu

SEQ ID NO: 2530 - RNA, 30 nt, Artificial Sequence
  Synthetic Construct
guguuaacauggaagaggauucauuguuuu

SEQ ID NO: 2531 - RNA, 30 nt, Artificial Sequence
  Synthetic Construct
uguuaacauggaagaggauucauuguuuuu

SEQ ID NO: 2532 - RNA, 30 nt, Artificial Sequence
  Synthetic Construct
acauggaagaggauucauuguuuuuauuuu

SEQ ID NO: 2533 - RNA, 30 nt, Artificial Sequence
  Synthetic Construct
auuguuuuuauuuuuauuuuuuuaauuuuu

SEQ ID NO: 2534 - RNA, 30 nt, Artificial Sequence
  Synthetic Construct
uuuuuauuuuuauuuuuuuaauuuuuucuu

SEQ ID NO: 2535 - RNA, 30 nt, Artificial Sequence
  Synthetic Construct
uuauuuuuauuuuuuuaauuuuuucuuuuu

SEQ ID NO: 2536 - RNA, 30 nt, Artificial Sequence
  Synthetic Construct
uauuuuuauuuuuuuaauuuuuucuuuuuu

SEQ ID NO: 2537 - RNA, 30 nt, Artificial Sequence
  Synthetic Construct
auuuuuauuuuuuuaauuuuuucuuuuuua

SEQ ID NO: 2538 - RNA, 30 nt, Artificial Sequence
  Synthetic Construct
uuuuuauuuuuuuaauuuuuucuuuuuuau

SEQ ID NO: 2539 - RNA, 30 nt, Artificial Sequence
  Synthetic Construct
uuauuuuuuuaauuuuuucuuuuuuauuaa

SEQ ID NO: 2540 - RNA, 30 nt, Artificial Sequence
  Synthetic Construct
uauuuuuuuaauuuuuucuuuuuuauuaag

SEQ ID NO: 2541 - RNA, 30 nt, Artificial Sequence
  Synthetic Construct
auuuuuuuaauuuuuucuuuuuuauuaagc

SEQ ID NO: 2542 - RNA, 30 nt, Artificial Sequence
  Synthetic Construct
uuuuuuuaauuuuuucuuuuuuauuaagcu

SEQ ID NO: 2543 - RNA, 30 nt, Artificial Sequence
  Synthetic Construct
uuuuaauuuuuucuuuuuuauuaagcuagc

SEQ ID NO: 2544 - RNA, 30 nt, Artificial Sequence
  Synthetic Construct
uuuaauuuuuucuuuuuuauuaagcuagca

SEQ ID NO: 2545 - RNA, 30 nt, Artificial Sequence
  Synthetic Construct
uuaauuuuuucuuuuuuauuaagcuagcau

SEQ ID NO: 2546 - RNA, 30 nt, Artificial Sequence
  Synthetic Construct
uaauuuuuucuuuuuuauuaagcuagcauc

SEQ ID NO: 2547 - RNA, 30 nt, Artificial Sequence
  Synthetic Construct
guguucaaauagcacuugacucugccugug

SEQ ID NO: 2548 - RNA, 30 nt, Artificial Sequence
  Synthetic Construct
agcuagcaucugccccaguugguguucaaa

SEQ ID NO: 2549 - RNA, 30 nt, Artificial Sequence
  Synthetic Construct
uuaagcuagcaucugccccaguugguguuc

SEQ ID NO: 2550 - RNA, 30 nt, Artificial Sequence
  Synthetic Construct
auuaagcuagcaucugccccaguugguguu

SEQ ID NO: 2551 - RNA, 30 nt, Artificial Sequence
  Synthetic Construct
uauuaagcuagcaucugccccaguuggugu

SEQ ID NO: 2552 - RNA, 30 nt, Artificial Sequence
  Synthetic Construct
uuauuaagcuagcaucugccccaguuggug

SEQ ID NO: 2553 - RNA, 30 nt, Artificial Sequence
  Synthetic Construct
acucugccugugauaucuguaucuuuucuc

SEQ ID NO: 2554 - RNA, 30 nt, Artificial Sequence
  Synthetic Construct
uuuauuaagcuagcaucugccccaguuggu

SEQ ID NO: 2555 - RNA, 30 nt, Artificial Sequence
  Synthetic Construct
cuuuuuuauuaagcuagcaucugccccagu

SEQ ID NO: 2556 - RNA, 30 nt, Artificial Sequence
  Synthetic Construct
ucuuuuuuauuaagcuagcaucugccccag

SEQ ID NO: 2557 - RNA, 30 nt, Artificial Sequence
  Synthetic Construct
uucuuuuuuauuaagcuagcaucugcccca

SEQ ID NO: 2558 - RNA, 30 nt, Artificial Sequence
  Synthetic Construct
uuucuuuuuuauuaagcuagcaucugcccc

SEQ ID NO: 2559 - RNA, 30 nt, Artificial Sequence
  Synthetic Construct
auuuuuucuuuuuuauuaagcuagcaucug

SEQ ID NO: 2560 - RNA, 30 nt, Artificial Sequence
  Synthetic Construct
aauuuuuucuuuuuuauuaagcuagcaucu

SEQ ID NO: 2561 - RNA, 30 nt, Artificial Sequence
  Synthetic Construct
uuuuuuauuaagcuagcaucugccccaguu

SEQ ID NO: 2562 - RNA, 30 nt, Artificial Sequence
  Synthetic Construct
ccauacacugugugcuauuuguguuaacau

SEQ ID NO: 2563 - RNA, 30 nt, Artificial Sequence
  Synthetic Construct
uuuuguacaaaacuuuuuuaaauauaaaug

SEQ ID NO: 2564 - RNA, 30 nt, Artificial Sequence
  Synthetic Construct
uuguacaaaacuuuuuuaaauauaaauguu

SEQ ID NO: 2565 - RNA, 30 nt, Artificial Sequence
  Synthetic Construct
gggaaagguuuaagauuauauaguacuuaa

SEQ ID NO: 2566 - RNA, 30 nt, Artificial Sequence
  Synthetic Construct
aagauuauauaguacuuaaauauaggaaaa

SEQ ID NO: 2567 - RNA, 30 nt, Artificial Sequence
  Synthetic Construct
agauuauauaguacuuaaauauaggaaaau

SEQ ID NO: 2568 - RNA, 30 nt, Artificial Sequence
  Synthetic Construct
uauaguacuuaaauauaggaaaaugcacac

SEQ ID NO: 2569 - RNA, 30 nt, Artificial Sequence
  Synthetic Construct
aauauaggaaaaugcacacucauguugauu

SEQ ID NO: 2570 - RNA, 30 nt, Artificial Sequence
  Synthetic Construct
auuccuaugcuaaaauacauuuauggucuu

SEQ ID NO: 2571 - RNA, 30 nt, Artificial Sequence
  Synthetic Construct
cuaugcuaaaauacauuuauggucuuuuuu

SEQ ID NO: 2572 - RNA, 30 nt, Artificial Sequence
  Synthetic Construct
auggucuuuuuucuguauuucuagaauggu

SEQ ID NO: 2573 - RNA, 30 nt, Artificial Sequence
  Synthetic Construct
uggucuuuuuucuguauuucuagaauggua

SEQ ID NO: 2574 - RNA, 30 nt, Artificial Sequence
  Synthetic Construct
uuucuguauuucuagaaugguauuugaauu

SEQ ID NO: 2575 - RNA, 30 nt, Artificial Sequence
  Synthetic Construct
uucuguauuucuagaaugguauuugaauua

SEQ ID NO: 2576 - RNA, 30 nt, Artificial Sequence
  Synthetic Construct
ucuguauuucuagaaugguauuugaauuaa

SEQ ID NO: 2577 - RNA, 30 nt, Artificial Sequence
  Synthetic Construct
cuguauuucuagaaugguauuugaauuaaa

SEQ ID NO: 2578 - RNA, 30 nt, Artificial Sequence
  Synthetic Construct
uguauuucuagaaugguauuugaauuaaau

SEQ ID NO: 2579 - RNA, 30 nt, Artificial Sequence
  Synthetic Construct
cuagaaugguauuugaauuaaauguucauc

SEQ ID NO: 2580 - RNA, 30 nt, Artificial Sequence
  Synthetic Construct
uagaaugguauuugaauuaaauguucaucu

SEQ ID NO: 2581 - RNA, 30 nt, Artificial Sequence
  Synthetic Construct
gaauuaaauguucaucuaguguuaggcacu

SEQ ID NO: 2582 - RNA, 30 nt, Artificial Sequence
  Synthetic Construct
uucucuuaaaagguaucaauguaccuuuuu

SEQ ID NO: 2583 - RNA, 30 nt, Artificial Sequence
  Synthetic Construct
cuuguucucuuaaaagguaucaauguaccu

SEQ ID NO: 2584 - RNA, 30 nt, Artificial Sequence
  Synthetic Construct
acuguugcuuguucucuuaaaagguaucaa

SEQ ID NO: 2585 - RNA, 30 nt, Artificial Sequence
  Synthetic Construct
aacuguugcuuguucucuuaaaagguauca

SEQ ID NO: 2586 - RNA, 30 nt, Artificial Sequence
  Synthetic Construct
uaacuguugcuuguucucuuaaaagguauc

SEQ ID NO: 2587 - RNA, 30 nt, Artificial Sequence
  Synthetic Construct
uuaacuguugcuuguucucuuaaaagguau

SEQ ID NO: 2588 - RNA, 30 nt, Artificial Sequence
  Synthetic Construct
uaaaaaaaaaaaacauacauuggggaaagg

SEQ ID NO: 2589 - RNA, 30 nt, Artificial Sequence
  Synthetic Construct
uauuuuuaacuguugcuuguucucuuaaaa

SEQ ID NO: 2590 - RNA, 30 nt, Artificial Sequence
  Synthetic Construct
uauugaagcuuguauuuuuaacuguugcuu

SEQ ID NO: 2591 - RNA, 30 nt, Artificial Sequence
  Synthetic Construct
auauugaagcuuguauuuuuaacuguugcu

SEQ ID NO: 2592 - RNA, 30 nt, Artificial Sequence
  Synthetic Construct
ggcacuauaguauuuauauugaagcuugua

SEQ ID NO: 2593 - RNA, 30 nt, Artificial Sequence
  Synthetic Construct
aucuaguguuaggcacuauaguauuuauau

SEQ ID NO: 2594 - RNA, 30 nt, Artificial Sequence
  Synthetic Construct
aauguucaucuaguguuaggcacuauagua

SEQ ID NO: 2595 - RNA, 30 nt, Artificial Sequence
  Synthetic Construct
aauuaaauguucaucuaguguuaggcacua

SEQ ID NO: 2596 - RNA, 30 nt, Artificial Sequence
  Synthetic Construct
aagcuuguauuuuuaacuguugcuuguucu

SEQ ID NO: 2597 - RNA, 30 nt, Artificial Sequence
  Synthetic Construct
uuuguacaaaacuuuuuuaaauauaaaugu

SEQ ID NO: 2598 - RNA, 30 nt, Artificial Sequence
  Synthetic Construct
agguuguaaaaaaaaaaaacauacauuggg

SEQ ID NO: 2599 - RNA, 30 nt, Artificial Sequence
  Synthetic Construct
uaugccuuggauacacaccgcucuucaggu

SEQ ID NO: 2600 - RNA, 30 nt, Artificial Sequence
  Synthetic Construct
uguacaaaacuuuuuuaaauauaaauguua

SEQ ID NO: 2601 - RNA, 30 nt, Artificial Sequence
  Synthetic Construct
guacaaaacuuuuuuaaauauaaauguuaa

SEQ ID NO: 2602 - RNA, 30 nt, Artificial Sequence
  Synthetic Construct
uacaaaacuuuuuuaaauauaaauguuaag

SEQ ID NO: 2603 - RNA, 30 nt, Artificial Sequence
  Synthetic Construct
uuuaaauauaaauguuaagaaaaauuuuuu

SEQ ID NO: 2604 - RNA, 30 nt, Artificial Sequence
  Synthetic Construct
uuaaauauaaauguuaagaaaaauuuuuuu

SEQ ID NO: 2605 - RNA, 30 nt, Artificial Sequence
  Synthetic Construct
uaaauauaaauguuaagaaaaauuuuuuuu

SEQ ID NO: 2606 - RNA, 30 nt, Artificial Sequence
  Synthetic Construct
aaauauaaauguuaagaaaaauuuuuuuua

SEQ ID NO: 2607 - RNA, 30 nt, Artificial Sequence
  Synthetic Construct
aauauaaauguuaagaaaaauuuuuuuuaa

SEQ ID NO: 2608 - RNA, 30 nt, Artificial Sequence
  Synthetic Construct
agaaaaauuuuuuuuaaaaaacacuucauu

SEQ ID NO: 2609 - RNA, 30 nt, Artificial Sequence
  Synthetic Construct
uuuuuaaaaaacacuucauuauguuuaggg

SEQ ID NO: 2610 - RNA, 30 nt, Artificial Sequence
  Synthetic Construct
uuuuaaaaaacacuucauuauguuuagggg

SEQ ID NO: 2611 - RNA, 30 nt, Artificial Sequence
  Synthetic Construct
uuuaaaaaacacuucauuauguuuaggggg

SEQ ID NO: 2612 - RNA, 30 nt, Artificial Sequence
  Synthetic Construct
uuaaaaaacacuucauuauguuuagggggg

SEQ ID NO: 2613 - RNA, 30 nt, Artificial Sequence
  Synthetic Construct
uaaaaaacacuucauuauguuuagggggga

SEQ ID NO: 2614 - RNA, 30 nt, Artificial Sequence
  Synthetic Construct
aaaaaacacuucauuauguuuaggggggaa

SEQ ID NO: 2615 - RNA, 30 nt, Artificial Sequence
  Synthetic Construct
aaaaacacuucauuauguuuaggggggaac

SEQ ID NO: 2616 - RNA, 30 nt, Artificial Sequence
  Synthetic Construct
auuauguuuaggggggaacugcauuuuagg

SEQ ID NO: 2617 - RNA, 30 nt, Artificial Sequence
  Synthetic Construct
aaaaugguaguggaaauucuaugccuugga

SEQ ID NO: 2618 - RNA, 30 nt, Artificial Sequence
  Synthetic Construct
aaaaaugguaguggaaauucuaugccuugg

SEQ ID NO: 2619 - RNA, 30 nt, Artificial Sequence
  Synthetic Construct
uccauuuaaaaaugguaguggaaauucuau

SEQ ID NO: 2620 - RNA, 30 nt, Artificial Sequence
  Synthetic Construct
uuauccauuuaaaaaugguaguggaaauuc

SEQ ID NO: 2621 - RNA, 30 nt, Artificial Sequence
  Synthetic Construct
caagacuuguuauccauuuaaaaaugguag

SEQ ID NO: 2622 - RNA, 30 nt, Artificial Sequence
  Synthetic Construct
gugguguuacaagacuuguuauccauuuaa

SEQ ID NO: 2623 - RNA, 30 nt, Artificial Sequence
  Synthetic Construct
gauacacaccgcucuucagguuguaaaaaa

SEQ ID NO: 2624 - RNA, 30 nt, Artificial Sequence
  Synthetic Construct
ucuuggugguguuacaagacuuguuaucca

SEQ ID NO: 2625 - RNA, 30 nt, Artificial Sequence
  Synthetic Construct
ggguuccauugucuuggugguguuacaaga

SEQ ID NO: 2626 - RNA, 30 nt, Artificial Sequence
  Synthetic Construct
aggguuccauugucuuggugguguuacaag

SEQ ID NO: 2627 - RNA, 30 nt, Artificial Sequence
  Synthetic Construct
uaggguuccauugucuuggugguguuacaa

SEQ ID NO: 2628 - RNA, 30 nt, Artificial Sequence
  Synthetic Construct
ggggggaacugcauuuuaggguuccauugu

SEQ ID NO: 2629 - RNA, 30 nt, Artificial Sequence
  Synthetic Construct
aggggggaacugcauuuuaggguuccauug

SEQ ID NO: 2630 - RNA, 30 nt, Artificial Sequence
  Synthetic Construct
uguuuaggggggaacugcauuuuaggguuc

SEQ ID NO: 2631 - RNA, 30 nt, Artificial Sequence
  Synthetic Construct
cauugucuuggugguguuacaagacuuguu

SEQ ID NO: 2632 - RNA, 30 nt, Artificial Sequence
  Synthetic Construct
ccugcaaaauaauacaacaccaacaucaau

SEQ ID NO: 2633 - DNA, 3162 bp, Artificial Sequence
  Synthetic Construct
atgagcagcgcgatcaaaagctacaagagcgttctgcgtccgaacgagcgtaagaaccaactgctgaaaagcaccattcagtgcctggaagacggtagcgcgttctttttcaagatgctgcaaggcctgtttggtggcatcaccccggagattgttcgtttcagcaccgaacaggagaaacagcaacaggatatcgcgctgtggtgcgcggttaactggttccgtccggtgagccaagacagcctgacccacaccattgcgagcgataacctggtggagaagtttgaggaatactatggtggcaccgcgagcgacgcgatcaaacagtacttcagcgcgagcattggcgaaagctactattggaacgactgccgtcaacagtactatgatctgtgccgtgagctgggtgttgaggtgagcgacctgacccatgatctggagatcctgtgccgtgaaaagtgcctggcggttgcgaccgagagcaaccagaacaacagcatcattagcgttctgtttggcaccggcgaaaaagaggaccgtagcgtgaaactgcgtatcaccaagaaaattctggaggcgatcagcaacctgaaagaaatcccgaagaacgttgcgccgattcaagagatcattctgaacgtggcgaaagcgaccaaggaaaccttccgtcaggtgtatgcgggtaacctgggtgcgccgagcaccctggagaaatttatcgcgaaggacggccaaaaagagttcgatctgaagaaactgcagaccgacctgaagaaagttattcgtggtaaaagcaaggagcgtgattggtgctgccaggaagagctgcgtagctacgtggagcaaaacaccatccagtatgacctgtgggcgtggggcgaaatgttcaacaaagcgcacaccgcgctgaaaatcaagagcacccgtaactacaactttgcgaagcaacgtctggaacagttcaaagagattcagagcctgaacaacctgctggttgtgaagaagctgaacgactttttcgatagcgaatttttcagcggcgaggaaacctacaccatctgcgttcaccatctgggtggcaaggacctgagcaaactgtataaggcgtgggaggatgatccggcggacccggaaaacgcgattgtggttctgtgcgacgatctgaaaaacaactttaagaaagagccgatccgtaacattctgcgttacatcttcaccattcgtcaagaatgcagcgcgcaggacatcctggcggcggcgaagtacaaccaacagctggatcgttataaaagccaaaaggcgaacccgagcgttctgggtaaccagggctttacctggaccaacgcggtgatcctgccggagaaggcgcagcgtaacgaccgtccgaacagcctggatctgcgtatttggctgtacctgaaactgcgtcacccggacggtcgttggaagaaacaccatatcccgttctacgatacccgtttcttccaagaaatttatgcggcgggcaacagcccggttgacacctgccagtttcgtaccccgcgtttcggttatcacctgccgaaactgaccgatcagaccgcgatccgtgttaacaagaaacatgtgaaagcggcgaagaccgaggcgcgtattcgtctggcgatccaacagggcaccctgccggtgagcaacctgaagatcaccgaaattagcgcgaccatcaacagcaaaggtcaagtgcgtattccggttaagtttgacgtgggtcgtcaaaaaggcaccctgcagatcggtgaccgtttctgcggctacgatcaaaaccagaccgcgagccacgcgtatagcctgtgggaagtggttaaagagggtcaataccataaagagctgggctgctttgttcgtttcatcagcagcggtgacatcgtgagcattaccgagaaccgtggcaaccaatttgatcagctgagctatgaaggtctggcgtacccgcaatatgcggactggcgtaagaaagcgagcaagttcgtgagcctgtggcagatcaccaagaaaaacaagaaaaaggaaatcgtgaccgttgaagcgaaagagaagtttgacgcgatctgcaagtaccagccgcgtctgtataaattcaacaaggagtacgcgtatctgctgcgtgatattgttcgtggcaaaagcctggtggaactgcaacagattcgtcaagagatctttcgtttcattgaacaggactgcggtgttacccgtctgggcagcctgagcctgagcaccctggaaaccgtgaaagcggttaagggtatcatttacagctattttagcaccgcgctgaacgcgagcaagaacaacccgatcagcgacgaacagcgtaaagagtttgatccggaactgttcgcgctgctggaaaagctggagctgattcgtacccgtaaaaagaaacaaaaagtggaacgtatcgcgaacagcctgattcagacctgcctggagaacaacatcaagttcattcgtggtgaaggcgacctgagcaccaccaacaacgcgaccaagaaaaaggcgaacagccgtagcatggattggttggcgcgtggtgtttttaacaaaatccgtcaactggcgccgatgcacaacattaccctgttcggttgcggcagcctgtacaccagccaccaggacccgctggtgcatcgtaacccggataaagcgatgaagtgccgttgggcggcgatcccggttaaggacattggcgattgggtgctgcgtaagctgagccaaaacctgcgtgcgaaaaacatcggcaccggcgagtactatcaccaaggtgttaaagagttcctgagccattatgaactgcaggacctggaggaagagctgctgaagtggcgtagcgatcgtaaaagcaacattccgtgctgggtgctgcagaaccgtctggcggagaagctgggcaacaaagaagcggtggtttacatcccggttcgtggtggccgtatttattttgcgacccacaaggtggcgaccggtgcggtgagcatcgttttcgaccaaaaacaagtgtgggtttgcaacgcggatcatgttgcggcggcgaacatcgcgctgaccgtgaagggtattggcgaacaaagcagcgacgaagagaacccggatggtagccgtatcaaactgcagctgaccagc

SEQ ID NO: 2634 - protein, 1054 aa, Artificial Sequence
  Synthetic Construct
MSSAIKSYKSVLRPNERKNQLLKSTIQCLEDGSAFFFKMLQGLFGGITPEIVRFSTEQEKQQQDIALWCAVNWFRPVSQDSLTHTIASDNLVEKFEEYYGGTASDAIKQYFSASIGESYYWNDCRQQYYDLCRELGVEVSDLTHDLEILCREKCLAVATESNQNNSIISVLFGTGEKEDRSVKLRITKKILEAISNLKEIPKNVAPIQEIILNVAKATKETFRQVYAGNLGAPSTLEKFIAKDGQKEFDLKKLQTDLKKVIRGKSKERDWCCQEELRSYVEQNTIQYDLWAWGEMFNKAHTALKIKSTRNYNFAKQRLEQFKEIQSLNNLLVVKKLNDFFDSEFFSGEETYTICVHHLGGKDLSKLYKAWEDDPADPENAIVVLCDDLKNNFKKEPIRNILRYIFTIRQECSAQDILAAAKYNQQLDRYKSQKANPSVLGNQGFTWTNAVILPEKAQRNDRPNSLDLRIWLYLKLRHPDGRWKKHHIPFYDTRFFQEIYAAGNSPVDTCQFRTPRFGYHLPKLTDQTAIRVNKKHVKAAKTEARIRLAIQQGTLPVSNLKITEISATINSKGQVRIPVKFDVGRQKGTLQIGDRFCGYDQNQTASHAYSLWEVVKEGQYHKELGCFVRFISSGDIVSITENRGNQFDQLSYEGLAYPQYADWRKKASKFVSLWQITKKNKKKEIVTVEAKEKFDAICKYQPRLYKFNKEYAYLLRDIVRGKSLVELQQIRQEIFRFIEQDCGVTRLGSLSLSTLETVKAVKGIIYSYFSTALNASKNNPISDEQRKEFDPELFALLEKLELIRTRKKKQKVERIANSLIQTCLENNIKFIRGEGDLSTTNNATKKKANSRSMDWLARGVFNKIRQLAPMHNITLFGCGSLYTSHQDPLVHRNPDKAMKCRWAAIPVKDIGDWVLRKLSQNLRAKNIGTGEYYHQGVKEFLSHYELQDLEEELLKWRSDRKSNIPCWVLQNRLAEKLGNKEAVVYIPVRGGRIYFATHKVATGAVSIVFDQKQVWVCNADHVAAANIALTVKGIGEQSSDEENPDGSRIKLQLTS

SEQ ID NO: 2635 - DNA, 32767 bp, Homo sapiens
gtctctgtccatccagactcctgacgttcaagttcgcagggacgtcacgtccgcacttgaacttgcagctcaggggggcttttgccatttttttcatctctctctctctctctccctctatctctcttctctctctctccctctttttttttttttttttttttttttttttgcttaaaaaaaagccatgacggctctcccacaattcatcttccctgcgccatctttgtattatttctaatttattttggatgtcaaaaggcactgatgaagatattttctctggagtctccttctttctaacccggctctcccgatgtgaaccgagccgtcgtccgcccgccgccgccgccgccgccgccgccgcccgccccgcagcccaccatgtctcgccgcaagcaaggcaaaccccagcacttaagcaaacgggaattctcgcgtaagtaacccaataatagtaataataattattaataatcacgagagcgcgcaggactagaagcaaaagcgagggggagagaggggtgtgtgcatgcatttttaaatttttcacgagaaaaacctccgagagtcgaggtaaaagagataaagggggaaaaaaccctcatcccatctggaaccattgccgtgtatgcacttttgagacagcacgcaccttttaattttatttaattttacaaaaatttgactcctcctctttcctcctttccgccgctttatttctcttttcgaaaaggaatgcaatgattccactccccccccgccccgccagttttgcaaaataatgaacaatgctaaggttgcgaacaactcacatgcaaacctgggggtgggagctggtggggaaagggaggttgcttcccactcaccgtaagaaaatgggggggtagggagggagtgagtacaagtctaaaaaacgattcccggggagaaaagaggtgagactggcttttggacaccagcgcgctcacggtcaagtgtgcagcgggaggaaagtagtcatccccacaatagtgagaaagtggcactgtggaaaggggcccccggcgctcctgagtccgcggagtcgggagaggggccgcggcgacggggagagccgtgggaccgggaaggacgggagacgcggccggcactgccgccttttgttccggccagaggtgggtgtttgtcccgctgccttttgtgccggctcctcgcgcttgccctcccgcgccgccgccgccgccgccgccgaagggcaggagctagggccgggggaggaggcggccgggggcacgcgggagagggagggagggagcccggactgctgcctcctgggttgccgctgccctcccctcccgaccgaacctcagaggcagcaaggagaagactggcacataaataaataaatacataaaaataaaataaataaaacaaggcaagagaatgtacaatttcttgcccccaaaccgaagccaaacgctctgccaacccttttctgtgacggccttctctttgactcccccaccagcccccctgcaaaaatctcacaatctctcatctagaaaaaaatttacaatcaccctcttcccccaaaccccttcagttgcaaacttagggcgccgacggcacggagagggagagaggaactccctcctcttactattttttggaagattttcaaaaaaagtggaagtggattttgattgggaaaaatctcgtgtctgaatgtttacaagcaccgcgtgtgcgggagcctcctgccaacaaacagacagaggaccgagcgcggcgcggcagccccggagcaggcggcggcggcggcctggcctcgcccgggccttgcccgacctcgccgcgccccagcccagccccggatcgcccacccggcgcccggcgcccacccgccaggcacggcggcaggccacgcagtgtctccgcgccagcctggcccgtggtcctggtccgcccccagcacaatgccgagacctcttctcgacctcccagactgcgaaatcggctgggtgaaactcggctttgcaaagcatttttattttgcagggcaactgtaaaagcgcgttctgcgcctcccctcccctccgccctgggtactttctcagacgtctcttgtccacagctcgggaccgcgaggaggtcaccacgtgctttccctgcccaccccccaccccgcccggtctggtcaccagtccccctgcgccccgagcacgactaggccaggtggcggggttgccggggaagggcaggggagaagtgtgtttgagtgtgcattttaagggcgctggatcctgggaccccgagcacttcaccctttgggtcttgccctcttccccaggcctggcttggtctgaggttcttgtgagtctgtataagagctggtggtggtggctgtctcccgctgactgcgcctggaaaggcgggcggtgggcacttaggaaagtttggcagcaagggaaagaaaggcgtgagggcccacattccccccctactcaatttatgattcttactttaaatttttgatgcagttttaaaggaccacctatacttggttctgtgtttttttaaaggggtggtggtggggggtgcgcacagggaatttaatttttcactgggccctggaacttgtcacacacttcggaagctcccccaccccggcacgttgcgcggccctccctctccccaccccctcgcatccctccctcgccgctctcccccgcccccaactcccccggccgcgccggatgcggatcagacgcggcgcgcggcggtgtgaagttacagcccggccaggtaccggcgggaaggaagggcagtgttcgcaggactcgggaaagtcaggcccttcttcggaaggatgcagtgggggctcaaaggacagaccggggcgcgcagtccaggctgctccctcgtacccctctccctcctgggtccatcttgggacactctaggctgggagggttagtaccccctcctcctgtcccggggttaaagggccagtttgggagggggtgagggggccacttctttctgtcctcattttctgggtgctcagagggggcaggagccatcccggtcctcagtaccacccccccgccccccgcctctgctatgtgggctgaatgagccattcggtcgctaggaggcagaacaagatcaagaaagctcagcgaacttgaacctgtaccagagcctcccccacctcctgcccggcgattctcgtccggggaggaacgagctttgcgagggtgggggtggggggaaagaacggttaggcagaattccctttctctcccccatcaccccgtatgtctttgttcttcattttgactttaaaaatgcttctggccggggccgcggagaagcgaccgggcgcgcggccgacacccccgtgcgcgagctgagaccagcgcgcgccgggctcggagcacggtgcagttttcgctttctttcggggccggcatttttggtagggaggaaccgggagtgcgcgctctagggcttcggggcatggccgaagagggggatatggcaagtttgcacttggtctccagcctcacttcttccaccccctcacccccatgcaaagcacagacctcggtggcctcggctggcttgctgggcggctctgcagcccgacaccccccctctcgcctcggagctcggaatcacaacaatagtaatagttatcatcataatgatgcgggcaggcagcgtcattaataatgaataaccgcagccgccgccgcgcacacccagtgcccagaattgcgggggaaatgcatttgcagagatcccccaaagtaaaaagtgtaagcttgtggacacagaatgaatctcaggacccgcgcttgaggtgtgtgcggagatactgagactgcaccaggttaaccagccgggttttccaaacctcacttcctttttcaccaactggcaggcccagggaaccgtcaccccgcggccgagctggccgagctggacgggcatggaggcagcagtcagggcccctggctgccctccgtctccgggcccccgggccccaaggccccgcggccgctgctgcacgtgttcgcagcaagcgcggcgggagcctgcagccagcacgctgctcgctttgtgcctcagagtccccgcgcccaacttcactttctgcacggtccacccttgccggggcccctgccccgggcctgtagcccccggctttgcttttgtttctttgcttttcctctctgaatttcagcctccgtttgcttctttaccctgttaagacaatcaaggagaaggacttggaaagcaaacttgaagacacatctccctttccccctccccctccgctccccggcagctctcgttttgctcgctccttaccaacatttcctataaggattatttttttcccttaaatttattcttttgcaactacacagagaggaaagagatctcagtctgtcactgagacattgagacgttccaggctgtcttgctgtttgaacgtagaagcattttattttctatttcttcctcccctcgtagagagaattcgcggctaattattatgattatttgcccactcccttccacttcaatcgaggactccctgctttgtagccggagtttaggccggagcttagaaatgttggtattgttggggcgaaggaggatggagttgaattgagggagggggtaaatggctgagggttaggaaggtttttagggaaaggggaatttgcattaaaatgcagagaaattatcagatgcccagaaaggaaatgttgattgccactgagaaaagatgtcaatgcaaatcagtagactacaccatgagaattgtattttcatattttctttgtgtcccactttgtctgatttttaataatataccagcaatgataaaaacacgttttggtatttctctgaacaccactagccaaatgttttgcaaggagaccgatgttaaacgtatttcatacattagaatataattcttgttaattagcaataatttacgttaagagcatagaaaatgttgaggttacaggttttatatctgtacatttgatcatcttgttattttcaagaactttgcctcctataaaattaattaggtgaaatgtggaggtgtaatcagcaacctctgaattaccacttcatttcccggttttgattgtaaatcagttcagtcactacatttagaagactttaaccaagtctgttttgaaccacattacctttaactatttgatacctaggagaatatttccttttgcacctaaataatattcccacttttagaaatgtgtcagaccttgggaacaaaaaaaaaaaaaaaagaatcttaacggtggaaataaaaaatttttttttttgcaaaggttctatgtactagtaagtttgataaaatattttcctaagtcttccttcagtctgtaaacctcagaacttgtagctaatgctaaacaaaaaagccacatttatcaatgtgtacttaaaatccttaattcagacaacaggaatattttgagaatgagttccctattcctcacttggtcaaaatggaagcaaatgtaagagaagaatgacattaaggcacaatgcagaggcacttctgtttgtcttcttttatttgaaaagtatgcatatgtattctgtatttatcttttggccagtatgttgggcaaagaaacataagtgcttactttactgtctttattagtaggaatataaccttcatattcctgtggtgaccttatgttaaattaggaggagtaccagaggctagaaattatgagatgtcctacttgagcacaggtgcagctaggcagggctctctcaatattatttcacctagcacatctgggagttactccagatcttccccctcaatattcagcctgggtagggttgaaataaatttaacctgagttcactggatttttgcactttatcaaaatctgttccaatattctacactcaaattaaaatctattttttgattctctgtggctttaagttcattaaatgtaaaattggcagcttgctaaagaaggtcagactgattaactgtttaagacttgtacattttctgcttcagttttattaactggcagcatcctggatgttttgtattttgtgattttttttttttttttgatagagcaagcataagatttcacaagcagagacttaccaactctcttttcccctttggaagcttaaaaaatgatagaagctggtaaagtagatgctggagtattttagtacaaagttaaaaaaaaaagcaaacaggaaagaaagacatgtctaccttgttataccatccgctggtgattatgtgtgcagaaatagtctcataatgaagcattttggagctcattcagaaaattagtccactttgacaacattaggcgaagtatttcaagtctaaagaaaggacttctcagccttgctctgaaatgtggtgtttgcttgaccattctgatttttatatcatagatgccaccaagtgcaaacatgtttagaatattataggcattccatttctcagaataaaaaaaaaatgactaattggcttattttcttaagtactcaaaagtatcccatttagctaatgtgtctgagaaatactgcccgtgcatttggtatttctttgattttgtggcactgctgagagtgagagcagaaaggtttttggcagtgtgaattatgctgcgacatgattattatttagatccgtttcataggtgcatgcagtcgttttcttattacagcagtgtaaatgtggcacatttttcatgtgacatagtagctttctaatttatgaagccatgtctgtttacttaggagtatatacattcacacacaaagggtgtgtgtgtttattcacctctcctttcattctttggcacaatggacaacttggtgtataggaaaaaagaaacaaatttggtttctatccacttttttttttaaccagtttttcttgtagttattatttaagctttctttatgttccctgtgttaactatttaagtagcattctttctaaacttacaaaccagacacatttgttgctgtgggtgtgtgcatgggtatatgtgtgtgtgtgtgttctctggagttatgcaaggaagactgttttctttacatatgtgatgatttgcctcattgacaaatttgctctctggttgataaccttcacatccttgtactttttgtatgctcacattttctgggtattatatagagaagcctagaaacactttacatgatgtggtgggatggcatggggttgagatgtgcttctcccctttctgtcctctctggcactctaataattgtgcttttgtttctccaaccacagccgagcctcttgaagccattcttacagatgatgaaccagaccacggcccgttgggagctccagaaggggatcatgacctcctcacctgtgggcagtgccagatgaacttcccattgggggacattcttatttttatcgagcacaaacggaaacaatgcaatggcagcctctgcttagaaaaagctgtggataagccaccttccccttcaccaatcgagatgaaaaaagcatccaatcccgtggaggttggcatccaggtcacgccagaggatgacgattgtttatcaacgtcatctagaggaatttgccccaaacaggaacacatagcaggtaaatgagaagcaaggagaaaagctgtttgcatgttttcttttcattttcagaggtgctgtagccaagcagtaaggagttgtgaagtgctttctctattactctatgtgactgtccatgacagccctgtaatgttaaaataatcatttctgttgcttacgtccagaacacagaaaaataaatattttccacctcactgaatcagatgtaggcaggataggtacacacatcagacaccttctctctggatctgtcgattttggatttcttttcttccccatccccaccttctcattttgaagtattgagctttactacacctagtccagcttccattgtccatttccagccttggtgacgtgtcagaggcaaagtggccatataggcatttgcagttcagccaatgacttgtttgactcagaacatctggccaggcctccttaggggttcagctcgttctcaaggcttccctgaagtagagtgggctggcagggtagttggaggtggtggaaagagttaactgagcttcagggctagccttggatccatattggctgtcagcccggatggggctgtaattaaacacagccccgtggtgggatgacaccatgaccttgactttaagatgccattttcgactggccaggccagagtagagagggcagttgctgaagcgcacagacatgcttactcgaaaagtttaagggcatgttggaaatttcaaaaggttggtttgacaggaacggctgctccctgcagcctgcctcctcagctaaatgataaatgcttctctgtgctctctcttgtctctgatgtggttttgacagatgtatcttgattttgtttgtggtttacacagccacatgtcacccttacaaatgtccagtccagactccactgtttctgctataacacaatgtaaaaattttcttggaaaaatacacacacgtattcaacagccctccctcctttggttaattttagcagggaggcagctaggtgtgtgggtttctcggcagctcaagggaaaaggaattaaaggctagcagtgggacttaaattcccttctctaagtgataaacagtaacactatatagtgaccctcaaaacattttttgcttgagcatgttagacaaaagtcaatgcagattctgtgatgacagacatgccatgcctgttggtggatcgctttcttccatctacctaccacccagctcccgaaaggcaagaggtttgttcagttttaggaaaggtagtgcatatcatgaattgattcactggaacttgtctctccgacctagtttgaccacaaagttgaaccataataggtcagtggtctagaggggattaaatgtcatattatttctcctctccccctctagaatttgatcattaaaaccaaacatggcattttctttctttttttagtgctttctgtgatagcactcagatactttccctttagtgaaatgggaaatctgctgctagggaagctgcatttgtggagtgtatttcttgaatccaccacatttaccttatgtgacatgtaggtgaagattttatctcccctaccccccagcaggatgtgggaatgaccatttccatgtgttgtcttgtgactggaaggaaaatgaacagaagtgtaaggcatgattaatgaagcaagagcaggcggaaggggatttgtcgtcttcggagatccaaagccttgctaaatcaccaaatatggagtaacacttgcgtgatgtaacatcgtatttacatatcgagctgctcgtttaaaagacaaaacacagtgtctgtcaagcaagaattaaaaccacacttcttactgaggtcccaaataggttattcagtcttagattaaccagctcaaaaattctgtgcctctgtatttagaggaggaatctaaatgctggggggaaggccttacatatagttaagacttttactgctatagttgtgaatctatgtagggaaataagagatatttgcttgaactccctggttgtctaaaggttctgttattatttttttaaagaacaagtataatagcagagcctagagaagccaaaaccaaaagcaaatttaaaatatattttatagcgctaataatcaatcatttaactgagacgaaaagctctctaagatgtctaagatattcaatgggcgcacaacaagtgctgtgacccaggtgaggtaaacctttcgtgcatgaataattacaaagtcttgatttctttcattgtgtttaatcacctgttcccaccctggaactggctgaacataaatagtgtggtcacatctcaaagtgagatgtcagtaactagaatcacgacttctcataattcacagtaatgaattaagagtttcctatggtgaagttaacattctaccattgcacataaattccgacgctctggccctcaggtgcccctgaagcgaagttctggaagacggctgtgtgtgtacccccagcccatttctctaaagcacgtctgcacaattccaagtctgcttttctttttatgatgaggaaggaaacaataacagtaatcattcagtagatatttgaattgtgtcacaaaaagaaaggagaagcaatgccttgtattaaggaaagagatatattgatgaatctctagaagaatgtgtttggcaaccacataaaaggtagtcatttaagcgtgctgggtaggaaaggctttattaaagtgatgtaagttggatttgagttcactgtgagcctgtactattttataggcaggaagcaagaataaaacagtgacagatcttcttcctaagataaataaagcttagaattcgggactttcagataggagaataaggcagagttctttaaatcttgagtaaaatggtatgcattttcactgtactcaggcctctccaagctgagttttttttttttttttttttttttagacagagttttgctcttgttgcccaggctggagtgcagtggcatgattttggctcactgcaacctctgcctcctaggttcaagcgattctcctgcctcagcctcccaagtagctgggattacaggcgtgtgccactacgcccagctagttttttgtattttcagtagaggcagggtttcaccatgttggccaggctggtcttgaactcctgacctcaggtgatccacctggcttggcctcccaaagtgctgggattacaggcttgagcgaccgcacctggcccaaactgagtattttttagaggattctttttacctggtgaatagatgggtatgtgctcccccacttcatccacgtacacatatgagctgtacacatagatgttaatcaggttgcttttttcattttatttaaatattcaaaatattgtgtgattgtgatccattgagatcattgaagtagtattaatttagctgggaattagcagcttatgttgtgtgggcccagttcatcaatatgtgtgtcaaatatccaccctcagatatcagcagcctttgacttgcagtcagagctttcaataggggttttgttttgttttgttttctttttttttagtctcatattttatgatggggggaaatattcatggaagattactgaatgtgaaactgctgttcccttatagaaaagacccaaacattatcccatcatgtcagatttgaggttttggcttattgcacataggaatctttaaattaggtttgggctgtcataaagttagctttttgagagactagagaaaaaatatgacaagtcctataaaatgtagtaaagtctgctcctgttgatatataacattttttctctttaaaatcatgaacatagacatttatatcagggtatttaaaattatttgcctagacagtatagctggtatttagataatgatatatcagacagatactctaaagaagggagatatagtaattcaaaatggaaatacattagcatgctcttaaaagtaaatcaaatacaatatgcttttcagaatttagaaaatgaacttaccttttctttttgtatccattctgattctctcctagctcagactgaactggaggatgtatttgtgtaccttatggtgtaattgtaaatgagactataaattatagtatgctattatgactacttatttttcttttctctttatttatgtgattctgaataaaaacgactgacttctgaagtgaattttcagcatggcagttaaaacaaaaaaacaccactaccacaaaaaacaatatactggtgaacattttacttaccttcaaaatccagagagtagagaatattgttttctaataagtacctaggattttcatagggagcctatgtttgtgaggccactatccaaagactaatgttcatgaaactgggagtcctatatacaagctgtatttgtaaataagacagagaaaggttgtgaactggcagcttggatgttttgtcaaagtacaatgtcagagaaactctttctaagacaaattgtaaatagaactgtcacagtgattgcatgattgagccgcagaagtgtcctacaattgttggcattgtcaggacttttgaaagcttaattaaacacagtggcccgcatggctgctaaacttactaaggaaagccaaaaggaaaaaaaaaatatatctaaaatgtagaagatcctaaagatcccaaacttcttcagacattacccttgtggtgacacagaaaagatgcattgtgcattttcctagtcatcttttataaataatgttttgagaataggtccacgtgatatgaagatcatcctgtgtgtgatgtggagattgtgttagtttttctgtctcctgctgttacagacagttaatgtaaaaatggccttttattggaaacacaaatatgtattcacttcaagaacaggagcagagggggacaaagtttccctcccgttctctgtgtttattctgtgaaagcttaaaaaaacaaaaaaacaaaataaccacacacacacacacacacacacacacacacacacacacacacacaaaaccagtgctgtaatttcttaaatcaccccattccttgttgtgttgcaagttgtgcctttactataaaggatctgaaatatgttttgcacacctttctcttagtgaatgtggcatataattgtggagctgcacatgggctggaaaatgcaactgggtgtagaaacgtgcaggcagggtcaggacaggcaaccttcagctcagggaggaggcgagttggatgcttattaatggcatcttttagagtcctggaaaatcattaatttcacactgcagcttccatgtagtttggctaatgtgggagtactaaattggggtacataaaaaacatgcaaatcctagggaaacattttttagatttttgtgatttctcaatgaaaatgtttaataaaggagaataggtgaatggtggctttgcgtgctggtcagtaagaaaggaaacaaattttggctttcctttggggggaaatattaaatttaaccgaagtagaaagcacagctagggagatgcaccaagattgcgtcactggatgttaatttaatctactttggttggtctgttcacaccctttattgcacaaagaagtcatttgacaaaatttaccccaagcccaagtctgtttttacatacagtagtaccagctttgtgcaataaaaagcacttagcatcaagctggacccagcctggcaccttgccacttttttagcatgagatttaatcaccaagcatctttagtacctttctgcttgttcagatttcatttgggtcatggctatgtcagcagtgttgttatttcaaggattaaaaaaaaagattctaacttagagcccacttttaacattatttcaaatcaagcaggtttttatgttatgtatcaatttggatgacattaatgaagttcataaaatatgttcagactatataatttaatggataatgactactatttttatttgtaatacaaataggaaattgactgttgtctccctccctccttggttcttttctcctacctaggtaaatgggcatccttaaacagcttctcccctttacgaccagggtatagagcactggccaatatcagtaaatttacctttgtaatttgccacgtagtttttacaacatgacctaattaatttgagcacgaaccatattattgctactggagtcattttctgtcacaaacttaatttccaggaaatgtaacctgacaaataagaattctttagctctctacatgtgctcctagagaccaaaggcagatttaaaataataataattttaaaagtgccagcattattaaagccagtatacttgatgccaaactcaatttgaagccagtaaacatcagactgtatttctaatcagttttaaaatgtaacttattccatattgggttcattggaatttgtctccctgctttttactggccagctgcactccctatgcatttttaaaacatttcagcaaaggcttttgctgttcttagcagggttagtaacttggggtctatttctgagctcattcgtcattctgcaatggcattgagttaggttggcaagggaaggatttgaggcatggggggtggtgaggtcacttctgatcccagcagggaataggtgagcttcatttgcctttacaataggcgcacagttactgcaccttggaggagctctcaggtgccgctcagatgggcgcatgtaaatgccctgtcagatgcggagctggaatattaatgcttcttccaccaccacaccataataaagctgtacacagcaagcttaatatgcagctagtctggggaattgtataaacttagatagcccagtgtgaaagacagcaatggaaaaatgctcgatatgccacagtttccattcttgttctcctttgatctatagcgaaatgaaaacatcatccttttcttctcttggagttgtctccccaactctgccacctcccaattcaccaccagaatttttttgcatgtgctggtatggagaaatgcaacataatttgtttcatatggttaattacaggcgtttgaatatttaaaattttaaatagccacagttccagcttttcccgttaaaagtatgtgatttgaacaaagggagtacagtgtaaatatttgtggtgatttgcaacacccctctttccccattacacacacacacacacacacacacacacacacacacacacacacagagagagagagagagagagacattcagtttaaatctagtactgatctaaaggacttctgtaccttcatttgtactttttttaaaaaacaactttcaactggaattccattaaaatatttcaccattatatttttgagtccacattgcttgaggttttaaagaagatttttataatgtgttcctttaacagaatcaacagctgtcagaagcagttgtggtagatccacaaaacgtataaagaaaaatacacgtttcctgaaacaaaacacttggaaaaataagctgctaagaactggcgaattagaagtttgcagacagggaactgaagtgtcatctcttggttcaccctggagactgatgtgagtggatctgatgcaatgctgctggaagatttacctgcacaggttgctcctctaaggcaacgcgcagtgcacgattgacgtatgcaccagagctaggctgggcctcagctcgctccatcttttgccctttttgatctctttagatagataaaataccaagttctcagagtgctaaacaacaaattatatatacctaaaggtgagatgatcaggtttaaacttcctgtaaaagaggcgagaaggcgccttgcacacccttttccagatagggctggcagcatgttattcagaactgaatcagtctctgccagagaattcccagtgggaacctggagcaggtatgttgatgaaggggatacctggggacctttggtcactcacaatgagtttttgtttgtattctcactgttgttagcattgccaatgaacaattgcacctacaatttgattttagttttagatagaggcgaatccactgattaaaaactcccattaaaataaagaatggaattattgtgaaacctgcaagggtgccttcaaaaagaaaaccagtgctgttgtatacctacctcgcctttctatttgctttttgaactttctaaaaaacacaaggaagctttttgctaagcatcagggcatttaaatttatattcatcagttgttcattttcttaatatgtaatgatgcataaaaaggctgcaaggaaatcacatctgttaatttttagggaaataaagtgtagcttggattcttatgttggagcacaaagcactatgtgccaagtctgttcctgtacattttaaatatagagttttaatatttggccaatccctgcacctcctcaaacaaaaacaaacctcaaaaaactaagagaaccaaacctgaagtattctccttcaccaactcaaggtataccatgattttatgatttatttacatttaggggggaacccctcagtgaaccatttactccccattttaactcccctgccccgatcctttcagtttccagttaaaacaatgcattaaccaatgttaaatcttaaatctcgtgagtttctctccatcacaccctaatattttaaaaaaattattcctttacatttaaaactgaacattggctactgaagaatgatttaaaggctgaaaaaaattttaataataaatcgtaaccttctcatgttatgtttttgttatgttaaggagaaaaaaatcaataaggaaaaatttaattctgataaagatactcttggatctttgaaaacaactgctgtccttttaactaaaacatttgagcagcttcaaagactatgtatttcttctgatcttggagctgtgtgactggtagcaagaaagaaaaaaaatcttattctacatacaagtggattgcttaacaagtcagcacagacacgtacttgtttgtacaatagagataaaaattcctgtataaaaataattcagctgctgacagcaggcattgttgttggacctgtcttttgtgcttgtcccagctctgggtccccctcccctcctatctgcttggggcagcctgctgcctgcacactgctgaccagaagttaattgctatatattaagtatataggtattgtatttaaagaggaatatctcaaggcttcctatatgcattccactttactttctgatgtgattgcggtgttgccagcaggggggtggcaggcaaacgctctaatagggaaaatcacttgaaggcagttaggggaaatttggccttcaagtcccatttgctctgtagtgtagcattggtttctaaacttttgtttttaatctaattctgatttgccctgtcacatcccatatcaaccctcattgaactctactcatgtagagtaacattagtgtcaaacggaattggtcaggactgtggacctgtggctcatacagatggttgtggatgtgggttccatgcagctctgcatcctatcctttctaataaatgttaaaatgtggcacatttctgagcagggcccaaggataagagagttaagaaatcagggggtagtacctgagatttttctcccttctctttccgatttccttgataacatccacatttccggtaagatcaactctaggagaaagtctgaggctgggggagagagggggagaagggtgcggagagaggttcttggaatattcttcgatagcagttcaaatgaaatccccacagcagagagcttttgggtctagcagtggagcggtaagctgggacacgtggcctttcgaagctgttattctcagtctgacttgcacaccagctgagataggacttaacatatactttcttgctttcacctgggttggagaggttggggttgggaggaagaggaggagttcattgggaattctgtcactagaattttttaaatgtcaggaggttagcaaggtgtgagttagcattcaagcaaaggattcttctccagactagtaattggaaagcctgcaaatccaggttcccacgatactctctaataactggggtgggatggtggtggtgggtggacaccacaactttctgaatgtcagctgatgtctgcatgacccgttcaccatggattaaatgcggctggtgccgaatggaggaaatcagaaaggcaaatctcaagcaacaggatttgcactcctcagaagtaaaccagaccttgctcctctccctcctgtgcttctcctttcttgctggtttccctttggaagcagaaacttctaaaattaatgccactccaagccaatgaaaaagctgtttttataccacagtggatgtttacacaggagagacaacttgagggggaaaaggctttttggaagggtggagggactcgtgttaatctgttctgttggaggactatgcagtattgcctatgagcgactctgggctgtttttgataaattaccatgtttagagataggtttggctcttaagggcttagttttatgaacaaagtccgtgacgatgtttgcagcctctgtttgtatcttagcccctttggcttgactagaagctctatgtttagtttaagctcagtctggaagatattacaattttgcattaaaaaaatgaggaaatcataggaagaaaaaccctttgctttttggatgaatcttactgataatttgctaaagctcatttgaattttaagcacttctttaatcttcaaaggctaaattgctttatgaatatgcatggtgtgggcagacttcagttcattacctagttgtaaattctaatgaccattaggtccttccagtaattgcgaattgttttgcatttttgattggcctattaacatgtacattcggtgcacatcaggctggcctgtcagcctgctgaaggagaaaaaaaaggtgaaaattgtttatagcaccaagattcttagattttcaatcttgcaaaattgatgatgtaaaaaaattaaagcagtgttttttcttctcaagattaaaagttcaccaagagatttgacatatttaatttacatgatgactttgcactccttcattaatgtaatttgcatatgaagctgttgttaatcacttttgatcatgttttgtgtattagctgcctcagtggctctcctcctcagatgccccagtagaaaggagcaaaatgatgcatcttcttgccaagtttcctttagtgaattgaggaattagaagtctaaccttgagtaattacatatgttttatccgttttcttttaacgttaagtacagtttgtgaacgtgttggctggaaatcgttctcatttggggagaagactgtaaaatttaagtatatgattgaggcacttccagatacatagagaaatatgtattgcctgtttctgttccccacgaacattgcagggcagttttattgttagcagtttgatggcaggaagccttggctattatagtgtattaagacatcaggttcctcctttggaggagggaaggctacagaactacaaacctttctaacaatgctttaggtttcttctttagatagatggctggcacctaaaggacttgggcctgggtttggctgactcttttatcttttagatcaagtaagttttctcattcagctgctgctctgagctacaatgtgtcctcccctcatcaccaaagtatatcctggtctccaggctccctgggctcccagtgtctccctcaaggtacacgagtgccctggtggtgaaaacaaggtgctaactaacggtttccgatttttgagagcctgtgattttggtgtttgcctttgctgttgaataacctgtgctgtattattgatgttcatctttggtttatgagtttatcactggttaacaagcagaatcagaacagtgtaactgatattctgattaaaacgaatgtttaatgaaagaaaataaattgtgatggaaaatgaacagtgtgtaagaaacataactataattttaacctccgagggacctagcactgccctaccgtgacttccatccataccatgctaaaagcatgcttcagtttaaagttgttaatattcagctgggaaacagtatccagaacacaaataaattattaagtgcatgaactttttaggcagtaagatgaactgatggggtccatctgtgagatccaggggctttttatttgtgtgtgtcgagcgattctgccctctccgacttcacagcctttggtctccggccaactgcatgcataattgattccacacgcactatcattttcttgatgtaattgctttactaagatatgatgaaatctaatggataatttgctatttgaaaatggtcaaaaaaaatcttcatactttatgtggggctgagtgggcagtggagaaaggggtattcagctgacccggtatttaagaaaacaaaacaagcaacactaacttatgcatgctgcttcagtcgcgttggctgtggataggaaggtctttgtgacatatggaagccagtgtataaatctctctccttctatcttgcatcacccccttcattccttctctctttctctcctctctctctcccccaaactttacaagaaagggatcctaacaaggtaaaaagtaaacaatttagtcatcacaagccttattattcagtctatccaggagttttgccatgtcggtttatttaacttccaggaatgtaaacactgacacagccctagaagcagcaagaaagattacagtattagagttaaaaacgtgagcatggaggagctgtgctttatactctgctataataacactttacattgaaacataatggtaagtcaaaagtgactggaaacttctgcttatatggagtacaaatttcattctaatagattggcataatctagtgtacccagggtagattgttatataatggagaaactgtataaatgtcaagtacacaaataattctacaggaagtaaataaaaagtattagaatttcttaagtcaccattaaattttggtggtgggacaatctcattagctccttcaaaatcatgtggctttgcataagtcttttgaaaatgtattttcagggaatttacagatggtgaaacattgttttaatccaaaccagttaatgctttaaatctacctttaaaaaaattgtactgtttttcgaagtacttaaagggagtggaggggtagaaagcatataagtgaatccatctcactgtggcaaactgtttttcaagtaaagtcataataatgaacaacacatgatctgaaatttgatcagcaaacatatccttatgccaaggaattttctttttttctttccttttttttctttttcgccattcacataccaaggttctgtaaatcagtaaaccaggcagagagtaactattgtaagggggaaaccaaatcataatacccagagtggcccagaagctgtctttctgaagaaacattaacgccaccaccaccaaaaaaagaaaaacaaaaaaacaaaaaacaaagcaaaacaaaacaaaacctttttaaaaaactggaaatgacagaatagttttaaaaggaaaaaaaaaaaaacccaaaaaccaaaaagcaacaaccaccttctgacgctcaaaacttcaaactattaatagaccaccagtgagatagactgtctttgtgccttgaaatgcaaaatgagggaaataattagcagaggaacaaaattctcaaaatttgaagaacttctgtgattactgggggtacagtgaaaagaaaatgcaaatttcttcctgatcttaattagattcgattgtgcggtgggtgtgttggatttggggggaggggcagaggcagggagtgctggggtgaggcgtgaggctgagtgttgtggagacaggttagcaggggcccggcggtgtggcaggaacaaaggcagcttccaacgctggtgcaggattccgagccttaacccagatgctcatggtgccctagtcttgagttcttcatttaggtgggcttatttcccactgggtctgggggatttcatttgtcctttgaggggcagggtggacactgacagaacagctgcggccggcagagagggtggttaggaagagggaagcagcctgtgggtaacttcccgaccacatggaaaggctgaataagacgttatggaccctgccttgggtactggggtcagcgtctcctggtggtgtctgcacagggccccccaatgccagggcactgccaaaacacgctcttgagtttaatggtagtggttggtctgagtcctgccaaagtgtatggagcaagtttcattggctggactttccccttgcatgaaataataaaagccctggccaaggcttatgaatctatttttgtttcattaatattatttattatgtattttattaatattttttggagggaccttgctctcatttgaccatttgtagttataattaatgcattccgtactggttgtaaaaagtgtgcttgcatttaattgcaagtcagggtaaattaatggatatgatttaaaacaaaactcacttaaaatattcttgcagaacgcaaaggagggggcagtcccagtatttaatttattttctggtttagtgttagtgtgagagggtcgaaaagattctgtgggtccaacgggatttgtgtctgtgtgtgcaggaccgtcgggcaacacagagggaggagaaaaacctggaccggagtagggtagccaggagctctttttttttttttctctaatttctgaggttgccaggaggggcttaagcaaagtggtcaagtccatctgctccggagaaggtggtaaagaaaagaggttagtggcaagagggaaggagcacaaagggaaaattgtacattgggagcgttactctccctggccatggtgtagccagactggtttagcagacagaatgatagattgttttgtcaggggtcccagggtgcgccctgaacttgaagcactttgtttatcttgaatagaaagggaaaagcgcagacataatcgatgtctagtttttaggagctcgaaagaggtaggagaacagagaagactcaggaggggtagtgggaggtgggggaggtgcaggccctggttgtggttgtccattaacagatgaacttggccgagggccaggctttagatgagagcgtgtcagggccccagtgcagccaagccttttcagtgttttttttttcctttttctttctttcttttttaaatacctgctgactgtacatcaaatgctccctggtcttttggctaaaggcaaaaaaataaaaaataaaaaaaaaaagagacgcacagctcaattttttccctcctctgaaccagttgaggccagtcttttggctacatatgcgggttctatcatctttcctggcttgccgttgggaaaaaaagttgtgataacgccagtaacccgagggccagatgggaagggtttggttgtgttcaggcgaccaggtgtgagagctcgtggtgcagtggggtggggcgtggccggcgtgcctgcgtgtgcaggtaagaaatcagtggaaactcttttttttttttttttttaaatggctgaagtttaacttgttggaagggcctgtgaattaagctgtcggtggctgagaacgataatatgcaaggaaggctcaaggaaggctcaagaaaggccaggggtggggaaaaggtgctcttgttagaggcgcagcctttcctgggcaggacccaggaccgatggcaaacccatgtgtttgggcttgttttgttctcgattttcttatcttcttggcctcttcctgtgttttttagtttattgtgacattatgcattcatatatgaatgttggcaagcaggagtcatcatcccaataacttcctgacatttttagctcttttaatgtgcagtctttgccctcctgccacaagtggcgaagtaattgaatttccctgttactaactggcaggaggcatgttctagttcccaccagaggagctgctggggctaaagctgggttcatagaatcccacctaggggacaccagggctttcaagtggtttggggacctgtctgaaatgatattcacacaataaaaaatatttttcccatcatagacttgaaaaggcaccattgtgcacatctatataaaatgtgataaaatcacatttacttcccctggctaggcctcataagggaggcaggatttccttctccttttctagtagcaaataaaaactgggaaaatttgggggcctctgggtttatcccatggatacctgcccccgctcccgcccgccaactcagccaagcccttagaggcagtcttctctcccacctagatgtctttgtaacctgagctggtaagaaagggaggagggacagaaagaggggaaatatgcccttgacatatgatgtatcttctttcttttcttcttctctttgattacacgaaataaaatggtttaggctgagggtaaagaagtaataccatttctagttgtgcaaccttgggcagatttcattccctaagcctccgcttcctcaatctgtaaagtggggagaatcacggggcttgcctcatagggcctttgagcatcctatgagagcatgtgggggcgctgggctcagtgctgggcacatggtaaaacatgtcacaaaagctcattactattacggttatgactcatggcttggaactgtgtgctcctggggtctcaaagtagttcccccattatggggtgagcaggttgggatgagagaagagcagggcaggtgggggtctaaagagctcagggtctcattatgtttctggtggcagctccctcgtgggtgggagtcccctctccccatagacgtgtgttgccttacgagaggcttgtgcctgcctgggtgtgtgacacagttactctgggttcagatttctatgttactgctagctggttgggagagtctgagggaatcatttcacctctctgtgaaatggagataactcaaggtcccttacctcatagagtccatgtgagaagtaaatgagggaaagcacagacattactcgctccgggggctgcacctccagaattgctgttgtcattattaccatgtgtctgacacattgatattccatcccacaacaacctcggaaaggaaacactcccattagcctcatttggtagaggaggaaattggggttcatcaagggttaaatgacttccctgagggtccacagttgttcaatcctttggcctgcggccgccaccctctgctacctcttcagtacgtttgcagctttcttcagcggtgccaggcaacaactgggcaggaagctctggtgctggacagttgtccctcccatgggttctgtggtcaagtttttcaatcttctgggaaagagaagaatgttcccctccagttctgggcatattgaaggagcacggagctgttgggaaaagttgcaatgtaaggaatcctgctttgcaagtagtcatttccccatctgtccagaatgagcctgaaatcaagtgagggtcctgagaaacagagggaggaggttttactgtttgtgtgtggcttggtcaggagactgcagtgggctgaatgagaaactaagctcggacttttaagaagtggtgaggcttggcctgcagcagttctgtgtgttgtctctgtggcatttacttctcggatcgtaccttcaaaggctggggagaatcagaattatacagggagggagagactgagtgtgagtgagtgtgcgtggcagtggtgtttcttaggacgatgggttctggggggtcataatctgcttcgaggaggttttcatttctggctgaacaaggctgtggtaaggcaagtccggaaggcatgctggaaacttgagggaagttttgaatggaaactgcagtcaacagctccatatgatccgcatgtggcttccccagaggcaagttttcagctgcgtggtggcctctcccagtcactccacaggctgccctgacgctattaatatttgctgaagcaagacctgaggttcgttgcagatggattacacaatgtattccaaaaccaaatgttactgttttcctgtattctccatcctttcaaattggccaggctaacatagacctccactgagagaatttcagaatcatttggtagttgagaagcgcctacttcatgcggaggccccgtgggaggagtggaagagttggcctcagcactggcgagtatcggatgggagctctgctcacttggtaagtccttctgctagaaccaagggaggctgttcagatccatcacaaagaagttgtcggtcacatccaggttgtcttctgagtttgaggtgggatggaggtggctgctgagaatccatgtgggtcaagagctccaaagcttcacttttacttcgcactctgtcccggggcatggacgtcctcaatggaggtcatgcaagcccttccccctcaccccttctcttggccctcttcattgtctctacatacccttgggtcaagagtgtagtggttctcccttgtcaccctggaagagaagctcttagttttatttgctgggtctcctagactgaaatgataaagctgaaatgataaaaggcgtatcatggctttagaacccttcttatttccctcgctcgcaccccctagttttccttctcttcccttgaaaatcagtgaaaatcaggccacatctctgatgatggccttttgtttctttttctttttctgtttctgccttcgttaggtaagcacaaatttgatgtcccaagaggcaggccggtgacccttcaggccaagtgcctggatgtggcaaagctacaataaatatcgaatggtgagagcaatggaaatttagcaaagccataaccggggagacctcagaggggcagtggactggttaagaggctgttggatgagccgggtagtatttctacttcaacctgattgaaatgtcgactaaaaatcaatgctgttgactagtgataatttacaacgttcctggtgctaagtagttccccgcttaagaatgcgttggctgggcagagattagcgcagggagttgtgtgtgtcacaatgaatcagacgcattataggtcagccctttatttgtttcatcatgacttttacacagttgtcatgtaatttatggctgctttcacgttgtcaaacattttcattgcatcttcttctttaacaccctcctgacatagacacactgcacttgaaggcttggtattgtttcataatccgagaggaggcctataaaccatcaaattacactatctttgggctaatctaaatgcgctgcagattaaaatcagagctcatttgtccctgatgcaaattattaagttctaattataaatacccatttaattacccgacacatttttattttgcggacccttttgagcactgctgtctgcgatgcagagggggtggggggagatgcataggagacaatctgcagtaattaatgtacacttcccaaatggtaaaggataaacatatgctgctttgtttgtcttatttatttattgattagatgtatagagactttggcgtgggcacaatctgaagttgaaatccttttaaagatgaaaactatttaaaaatcttttggggaagaaagagcaaaatatagccaaccaatagctttctgctagaacacatcatcccaaaatatgggattctgaatttgatcaaatcaccagtttctgaatttgatcaaatctagattttgcagaagttcagggtgagagaaaccatgcctgttttatatctagaaagtgaaatcattgttatagaaaaaacctactgtggttagaaaaaaaccacattcttttttcccagccctgctgccatcctctaccagaaaataacagtatctgcctgtagtatgaagaccttccaattgagagcattatgataaactatttttgattaccaaacacgaatgaaggaagaagataacataaaaattagtaaaggccttccaagtagacatttacccttctgtgaaagccatggagaaattaccaagactggtttggggggagggcatttaaggtcttttgggcattacagattttccagaaccaaactttgacttttagtgttaacagagagacactgatctgaaaaccaggacacctgggttctgacccttattgtatcatgctgtgagattttgggctcccttcacctgttagcatttgtttccttgtcttgtaaagtaggtaaaatagatagtttggactgggtgggtctctaagtccccatgatgttctagcatagtatgaacaccactgaccagttttctccctgctattttttggaatctagttgctgaatggggctcacctgcaaagacagcagaatattattttcttgatttgcctcaaagatggaagctatggtggagattaaggcttggattcgtgattccccaacagaaagcttaaaggcatctttcaaattgctggaagcaaaattgaagtgcagtataatggaatggtgataattcacagaagtttccagccttataagatttctccatcttttaattgttgcaagctgttttttttgaaaaactccaaagaatgtaatgtgtattttctccaagtttgcttttttgggcaaatgtaactacatcaaaatagaagtacgtttttgaaaaagaaatagttgaattcaaacaaccaggtattttaaattcaattaactgactgaattcagtgatattttcctccttcctcctcccaaaagctggtttctctgtatggacatagcctacatatgctgagtccctggagttaggaatttttgcttgttaaaggcatccgatgcaacatgtttagaagaactctccctctgttagtgttgaagacagcataaattgagggaaaatgttctttttttattcatcatgtaggtaaaagcatatggcctgttctgggacatgcgatctttgcaatccattttttaaacttggtgtttaccattggcttttagcacggatgtttctgttttccacactgtccagcaaataccatttatatgtggcattgaatgagatatgaaatgttttcagaagcatgctgaaaaagggcattcaaagttatcctttggataatgatgatctaaaactttcttttattatcccatgtgctcagagtaaggggcaaatgaatcagttgtgaaatatgtgttccttgtaggacacaggcactcttgagatctatagcttcaataaaaaggtaatttatttaaattactgcctctttaatttataatgttttggggatttttaataggcatgctctgtaagggcactggtaatcagctgtttctgattttgcatgctcttctatctctggtaacaaaataaaatcttaaaaaacaagaaaaaagaaaaaaaaacaaaaacaaaaacaaggaacataaagtttagccctaacccaacccaaaagcaaataacaggccgaatgaatggcagccccccagaggctctactttccccttccattattacctgaaataaaagcatgataacattcatgccagagataggtgacaaaattatgtattcagacatgaagtttaggatttcatagcccaatgttctctcttctcccccacctcttattgtgttgtgcaaatgtatcagccgttgtattgttaatgcatgataggaagctgccgctaggacagtcttggctcactaatgcggtcagctgtgtcacaatgtgatatatagattatatttaccatggcatattttgtttgcgaaatgggagcggatgataaatgaagataccctccagttttcacactagttcctgtggtccggagtctctcaaacaataaagcacccctgataatggagaggtatttatgggaacataattgacttcaaagttttagatctctggctgaagtttaagatgggatagtccattacattaatgtctgtgcttaaagctcctatttggcttaaataaattatttagggtttactgcttaaaccttggtcaattcttgaacgtttgggctagttaagtaattttccagtgactttctgtgccttggtgattcatttacttgattgagctcctgtgtgctcgtatgatttctaaatgtatttctcaagttttgcctggcaatgaatgattttgcttactggagtcttgtgtggtacacctataaaaggcttattaactctttttgaaaaaaaaaaaaatccccaaacacatcaacactgtcatcataagataaagcatatatacatatgcatctatatacacacatacatatgtacatactacatatatacatacgtatatgcatgtatgaatatatatatagttgtgtgcctgtgtgtgtgtagaaagggagagagagagaataggaaagtctttagaattcaccatgattccatcaaatcaatatagaagtttttgaaagctatccatgtagaaaccacttttcatcaaaatctgacttaagcaaattatctccatactatttatctgaaagtctgttgttcacatagcgctggattgaggatcatagtggcaaatttaggagcaacagtcccaagcaggaatcctggatggcaggctgtcctttgtgcctcccctgagttgagaagactggtgtttattctttctctaggttgcaacacgtgttgccttgaaatctcccttctttacggttctgccatgagtgtattttctgtgacctgcctctgcatctggttaaatggacttcagtaatctgtacacagttacttcttacttattttatatcctgaaagatattaagtccaacaagcttttacccacagagtctacagagaaaacggccaggcaatttttgtttcaatctctgtgtctctctggagcactagttccagaggctgatcaataggttttattgtagacctcactgtctctaaaagcattttgaccttatcctgtctaaaaatagtatttgctcttgcctgcagaaccttgacctgtgaaaacccatttggaacataactgacatatctagtcagctgtatatccaagacatgctctgtgaatgaattctgtgcagaaccgtccaggagaacactttcttccaagacaaatgaattccagttctgaacactgggagtgcacctgcttgtcggatgtggtgatgggccacatggtggggagtgagggagactcagggcctgtggggcagtcgatgtgggaggactgtcacagagactctcagagggtgcattcagccctgaacagggcaaaggactgcaaggggcaggagcttgggctgacatgcaaggtggctttacacaaggccctttttagagagtgtgattctctgaagcttttcttggcagcttcagtcttgaacctcactggaagggatcctccaaaacatgacccagatggaaagaagtatttctgagtttaaaataactcccctatttggtaatacgggactttatttgtgactttattatttttaggtgtgataatggttttgcagttgtatttaaaagaaaaaaaacgagttcctatgtttaaaaaatacatacagaggtgtttactgatgaaatgatatgacgtctgggatcaacttaaataataaaatgggctagggaggcgatagggttacagaagacaagaatgactgtgagctgtggtggttggagctggaagatgtggacttggggactgatttataacattctctctacttttgtagtatttgagatttttccagaaaataaaggtattgcctgactggtggagagcagtatggccttgtttagtcggtgttgtttcttcaccaagggtttggctcagaggtagcaaggggacaagtgtcctatgggcaagaaagtacctgtgagctcaagtcttgtatctgggaagttcattgtgaaggggtcatttaagggtctgtactgtgcactgtcccccattctcctggaagaacagagatcccttgtctttttcagtgcatgaggcagagtcagatgtggcgtttgcttgagtttcagcacaggtgcctctgtgcctcgtggtgagggtcaggaagaagcagctgggacgtgctcacgtggctggtagtgttatgaagacaaggctttgggacctttctttggccatttgagccctggctattagagaaagatgatttgcctgagaggagattgaccacactctcagaaagaaggggacaaagaacacgtcaagggttaagcagccttccctttaagggaggactggggcacaagatggaagatgaaagggagcagagtggcaattgcagagctggaaaggggaattttgttcttctagatagcaaaagccaggactgtcgctgtgtgacttgaaagctaggtcactggtgggcttcgtgcagcccgtcacaggggagccatggtgggcctcgtctctgccgtatctgctgcctggaagctgagactggcctaaccacatcacaccattcccagacccaggcccaggcccaggcccgggtccctctggttttacaaaatgtccgctctctctcgcttcacacagaggctattattagcaagtgtcactcagttatctgagagtggcgcttttagctgccatctaagtgcctgatacttgggtttacagcagattaaattaaattttaggctggtttggcttcactggcagtagacaatggaaggcagctgttgtagaaatgtaacctggcaccctcaaggatttgtgtgagtgtgtgtgtgtgtgtgtgtgtgagtgtgtgtgtgtgtgtgtgtgtgtgtgtgtgtgctgaccactaggctacacttccttttcctttcctctccatttcatccctttccaaaaagtgtttagacaaatagtttcccagacttggttttatcatgctgggttgacaaaggttgtgtacagagctggaataattttttcttctttctactgttggcacatcaatatctttttttctgc

SEQ ID NO: 2636 - DNA, 489 bp, Homo sapiens
gtctctgtccatccagactcctgacgttcaagttcgcagggacgtcacgtccgcacttgaacttgcagctcaggggggcttttgccatttttttcatctctctctctctctctccctctatctctcttctctctctctccctctttttttttttttttttttttttttttttgcttaaaaaaaagccatgacggctctcccacaattcatcttccctgcgccatctttgtattatttctaatttattttggatgtcaaaaggcactgatgaagatattttctctggagtctccttctttctaacccggctctcccgatgtgaaccgagccgtcgtccgcccgccgccgccgccgccgccgccgccgcccgccccgcagcccaccatgtctcgccgcaagcaaggcaaaccccagcacttaagcaaacgggaattctcgcgtaagtaacccaataatagtaataataattattaataatcacgagagcgc

SEQ ID NO: 2637 - DNA, 430 bp, Homo sapiens
ctgtcctctctggcactctaataattgtgcttttgtttctccaaccacagccgagcctcttgaagccattcttacagatgatgaaccagaccacggcccgttgggagctccagaaggggatcatgacctcctcacctgtgggcagtgccagatgaacttcccattgggggacattcttatttttatcgagcacaaacggaaacaatgcaatggcagcctctgcttagaaaaagctgtggataagccaccttccccttcaccaatcgagatgaaaaaagcatccaatcccgtggaggttggcatccaggtcacgccagaggatgacgattgtttatcaacgtcatctagaggaatttgccccaaacaggaacacatagcaggtaaatgagaagcaaggagaaaagctgtttgcatgttttcttttcatttt

SEQ ID NO: 2638 - DNA, 202 bp, Homo sapiens
gatgcacgttgtttgtagctgtagtgcttgattttgggtttctttcacagataaacttctgcactggaggggcctctcctcccctcgttctgcacatggagctctaatccccacgcctgggatgagtgcagaatatgccccgcagggtatttgtaagttgagccttatttcttctacaaatgtccatgtgtatagagatgag

SEQ ID NO: 2639 - DNA, 5331 bp, Homo sapiens
tgcccgcctcagtgattaaacattgatgttggtgttgtattattttgcaggtaaagatgagcccagcagctacacatgtacaacttgcaaacagccattcaccagtgcatggtttctcttgcaacacgcacagaacactcatggattaagaatctacttagaaagcgaacacggaagtcccctgaccccgcgggttggtatcccttcaggactaggtgcagaatgtccttcccagccacctctccatgggattcatattgcagacaataacccctttaacctgctaagaataccaggatcagtatcgagagaggcttccggcctggcagaagggcgctttccacccactccccccctgtttagtccaccaccgagacatcacttggacccccaccgcatagagcgcctgggggcggaagagatggccctggccacccatcacccgagtgcctttgacagggtgctgcggttgaatccaatggctatggagcctcccgccatggatttctctaggagacttagagagctggcagggaacacgtctagcccaccgctgtccccaggccggcccagccctatgcaaaggttactgcaaccattccagccaggtagcaagccgcccttcctggcgacgccccccctccctcctctgcaatccgcccctcctccctcccagcccccggtcaagtccaagtcatgcgagttctgcggcaagacgttcaaatttcagagcaacctggtggtgcaccggcgcagccacacgggcgagaagccctacaagtgcaacctgtgcgaccacgcgtgcacccaggccagcaagctgaagcgccacatgaagacgcacatgcacaaatcgtcccccatgacggtcaagtccgacgacggtctctccaccgccagctccccggaacccggcaccagcgacttggtgggcagcgccagcagcgcgctcaagtccgtggtggccaagttcaagagcgagaacgaccccaacctgatcccggagaacggggacgaggaggaagaggaggacgacgaggaagaggaagaagaggaggaagaggaggaggaggagctgacggagagcgagagggtggactacggcttcgggctgagcctggaggcggcgcgccaccacgagaacagctcgcggggcgcggtcgtgggcgtgggcgacgagagccgcgccctgcccgacgtcatgcagggcatggtgctcagctccatgcagcacttcagcgaggccttccaccaggtcctgggcgagaagcataagcgcggccacctggccgaggccgagggccacagggacacttgcgacgaagactcggtggccggcgagtcggaccgcatagacgatggcactgttaatggccgcggctgctccccgggcgagtcggcctcggggggcctgtccaaaaagctgctgctgggcagccccagctcgctgagccccttctctaagcgcatcaagctcgagaaggagttcgacctgcccccggccgcgatgcccaacacggagaacgtgtactcgcagtggctcgccggctacgcggcctccaggcagctcaaagatcccttccttagcttcggagactccagacaatcgccttttgcctcctcgtcggagcactcctcggagaacgggagtttgcgcttctccacaccgcccggggagctggacggagggatctcggggcgcagcggcacgggaagtggagggagcacgccccatattagtggtccgggcccgggcaggcccagctcaaaagagggcagacgcagcgacacttgtgagtactgtgggaaagtcttcaagaactgtagcaatctcactgtccacaggagaagccacacgggcgaaaggccttataaatgcgagctgtgcaactatgcctgtgcccagagtagcaagctcaccaggcacatgaaaacgcatggccaggtggggaaggacgtttacaaatgtgaaatttgtaagatgccttttagcgtgtacagtaccctggagaaacacatgaaaaaatggcacagtgatcgagtgttgaataatgatataaaaactgaatagaggtatattaatacccctccctcactcccacctgacaccccctttttcaccactccccttccccatcgccctccagccccactccctgtaggatttttttctagtcccatgtgatttaaacaaacaaacaaacaaacagaagtaacgaagctaagaatatgagagtgcttgtcaccagcacacctgttttttttctttttctttttcttttttctttttccttttttttttttttcctttatgttctcaccgtttgaatgcatgatctgtatggggcaatactattgcattttacgcaaactttgagcctttctcttgtgcaataatttacatgttgtgtatgtttttttttaaacttagacagcatgtatggtatgttatggctattttaaattgtccctaattcgttgctgagcaaacatgttgctgtttccagttccgttctgagagaaaaagagagagagagagaaaaagaccatgctgcatacattctgtaatacatatcatgtacagttttattttataacgtgaggaggaaaaacagtctttggattaaccctctatagacagaatagatagcactgaaaaaaaatctctatgagctaaatgtctgtctctaaagggttaaatgtatcaattggaaaggaagaaaaaaggccttgaattgacaaattaacagaaaaacagaacaagtttattctatcatttggttttaaaatatgagtgccttggatctattaaaaccacatcgatggttctttctacttgttataaacttgtagcttaattcagcattgggtgaggtaataaaccttaggaactagcatataattctatattgtatttctcacaacaatggctacctaaaaagatgacccattatgtcctagttaatcatcatttttcctttagtttaattttataaacaaaactgattataccagtataaaagctactttgctcctggtgagagcttaaaagaaatgggctgttttgcccaaagttttattttttttaaacaatgattaaattgaatgtgtaatgtgcaaaagccctggaacgcaattaaatacactagtaaggagttcattttatgaagatatttgctttaataatgtctttttaaaaatactggcaccaaaagaaatagatccagatctacttggttgtcaagtggacaatcaaatgataaactttaagaccttgtataccatattgaaaggaagaggctgacaataaggtttgacagaggggaacagaagaaaataatatgatttattagcacaacgtggtactatttgccatttaaaactagaacaggtatataagctaatattgatacaatgatgattaactatgaattcttaagacttgcatttaaatgtgacattcttaaaaaaagaagagaaagaattttaagagtagcagtatatatgtctgtgctccctaaaagttgtacttcatttcttttccatacactgtgtgctatttgtgttaacatggaagaggattcattgtttttatttttatttttttaattttttcttttttattaagctagcatctgccccagttggtgttcaaatagcacttgactctgcctgtgatatctgtatcttttctctaatcagagatacagaggttgagtataaaataaacctgctcagataggacaattaagtgcactgtacaattttcccagtttacaggtctatacttaagggaaaagttgcaagaatgctgaaaaaaaattgaacacaatctcattgaggagcattttttaaaaactaaaaaaaaaaaaactttgccagccatttacttgactattgagcttacttacttggacgcaacattgcaagcgctgtgaatggaaacagaatacacttaacatagaaatgaatgattgctttcgcttctacagtgcaaggatttttttgtacaaaacttttttaaatataaatgttaagaaaaattttttttaaaaaacacttcattatgtttaggggggaactgcattttagggttccattgtcttggtggtgttacaagacttgttatccatttaaaaatggtagtggaaattctatgccttggatacacaccgctcttcaggttgtaaaaaaaaaaaacatacattggggaaaggtttaagattatatagtacttaaatataggaaaatgcacactcatgttgattcctatgctaaaatacatttatggtcttttttctgtatttctagaatggtatttgaattaaatgttcatctagtgttaggcactatagtatttatattgaagcttgtatttttaactgttgcttgttctcttaaaaggtatcaatgtaccttttttggtagtggaaaaaaaaaagacaggctgccacagtatatttttttaatttggcaggataatatagtgcaaattatttgtatgcttcaaaaaaaaaaaaaagagagaaacaaaaaagtgtgacattacagatgagaagccatataatggcggtttgggggagcctgctagaatgtcacatggatggctgtcataggggttgtacatatccttttttgttcctttttcctgctgccatactgtatgcagtactgcaagctaataacgttggtttgttatgtagtgtgctttttgtccctttccttctatcaccctacattccagcatcttaccttcatatgcagtaaaagaaagaaagaaaaaaaaaggaaaaaaaaaaaaaaaccaatgttttgcagtttttttcattgccaaaaactaaatggtgctttatatttagattggaaagaatttcatatgcaaagcatattaaagagaaagcccgctttagtcaatacttttttgtaaatggcaatgcagaatattttgttattggccttttctattcctgtaatgaaagctgtttgtcgtaacttgaaattttatcttttactatgggagtcactatttattattgcttatgtgccctgttcaaaacagaggcacttaatttgatcttttatttttctttgtttttatttttttttttatttagatgaccaaaggtcattacaacctggctttttattgtatttgtttctggtctttgttaagttctattggaaaaaccactgtctgtgtttttttggcagttgtctgcattaacctgttcatacacccattttgtccctttattgaaaaaataaaaaaaattaaagtacacattgtaagcttcttgtgtcctcatttgacacactctgtaaattacttgc

SEQ ID NO: 2640 - DNA, 149 bp, Homo sapiens
catctactcttagacataacacaccagggtcaatacaactttgaagctagtctagtgcaagctaacagttgcttttatcacaggctccaggaagggtttggcctctgattagggtgggggcgtgggtggggtagaagaggactggcaga

SEQ ID NO: 2641 - protein, 1054 aa, Artificial Sequence
  Synthetic Construct
MSSAIKSYKSVLRPNERKNQLLKSTIQCLEDGSAFFFKMLQGLFGGITPEIVRFSTEQEKQQQDIALWCAVNWFRPVSQDSLTHTIASDNLVEKFEEYYGGTASDAIKQYFSASIGESYYWNDCRQQYYDLCRELGVEVSDLTHDLEILCREKCLAVATESNQNNSIISVLFGTGEKEDRSVKLRITKKILEAISNLKEIPKNVAPIQEIILNVAKATKETFRQVYAGNLGAPSTLEKFIAKDGQKEFDLKKLQTDLKKVIRGKSKERDWCCQEELRSYVEQNTIQYDLWAWGEMFNKAHTALKIKSTRNYNFAKQRLEQFKEIQSLNNLLVVKKLNDFFDSEFFSGEETYTICVHHLGGKDLSKLYKAWEDDPADPENAIVVLCDDLKNNFKKEPIRNILRYIFTIRQECSAQDILAAAKYNQQLDRYKSQKANPSVLGNQGFTWTNAVILPEKAQRNDRPNSLDLRIWLYLKLRHPDGRWKKHHIPFYDTRFFQEIYAAGNSPVDTCQFRTPRFGYHLPKLTDQTAIRVNKKHVKAAKTEARIRLAIQQGTLPVSNLKITEISATINSKGQVRIPVKFRVGRQKGTLQIGDRFCGYDQNQTASHAYSLWEVVKEGQYHKELGCFVRFISSGDIVSITENRGNQFDQLSYEGLAYPQYADWRKKASKFVSLWQITKKNKKKEIVTVEAKEKFDAICKYQPRLYKFNKEYAYLLRDIVRGKSLVELQQIRQEIFRFIEQDCGVTRLGSLSLSTLETVKAVKGIIYSYFSTALNASKNNPISDEQRKEFDPELFALLEKLELIRTRKKKQKVERIANSLIQTCLENNIKFIRGEGDLSTTNNATKKKANSRSMDWLARGVFNKIRQLAPMHNITLFGCGSLYTSHQDPLVHRNPDKAMKCRWAAIPVKDIGRWVLRKLSQNLRAKNRGTGEYYHQGVKEFLSHYELQDLEEELLKWRSDRKSNIPCWVLQNRLAEKLGNKEAVVYIPVRGGRIYFATHKVATGAVSIVFDQKQVWVCNADHVAAANIALTGKGIGEQSSDEENPDGSRIKLQLTS

SEQ ID NO: 2642 - protein, 1054 aa, Artificial Sequence
  Synthetic Construct
MSSAIKSYKSVLRPNERKNQLLKSTIQCLEDGSAFFFKMLQGLFGGITPEIVRFSTEQEKQQQDIALWCAVNWFRPVSQDSLTHTIASDNLVEKFEEYYGGTASDAIKQYFSASIGESYYWNDCRQQYYDLCRELGVEVSDLTHDLEILCREKCLAVATESNQNNSIISVLFGTGEKEDRSVKLRITKKILEAISNLKEIPKNVAPIQEIILNVAKATKETFRQVYAGNLGAPSTLEKFIAKDGQKEFDLKKLQTDLKKVIRGKSKERDWCCQEELRSYVEQNTIQYDLWAWGEMFNKAHTALKIKSTRNYNFAKQRLEQFKEIQSLNNLLVVKKLNDFFDSEFFSGEETYTICVHHLGGKDLSKLYKAWEDDPADPENAIVVLCDDLKNNFKKEPIRNILRYIFTIRQECSAQDILAAAKYNQQLDRYKSQKANPSVLGNQGFTWTNAVILPEKAQRNDRPNSLDLRIWLYLKLRHPDGRWKKHHIPFYDTRFFQEIYAAGNSPVDTCQFRTPRFGYHLPKLTDQTAIRVNKKHVKAAKTEARIRLAIQQGTLPVSNLKITEISATINSKGQVRIPVKFRVGRQKGTLQIGDRFCGYDQNQTASHAYSLWEVVKEGQYHKELGCFVRFISSGDIVSITENRGNQFDQLSYEGLAYPQYADWRKKASKFVSLWQITKKNKKKEIVTVEAKEKFDAICKYQPRLYKFNKEYAYLLRDIVRGKSLVELQQIRQEIFRFIEQDCGVTRLGSLSLSTLETVKAVKGIIYSYFSTALNASKNNPISDEQRKEFDPELFALLEKLELIRTRKKKQKVERIANSLIQTCLENNIKFIRGEGDLSTTNNATKKKANSRSMDWLARGVFNKIRQLAPMHNITLFGCGSLYTSHQDPLVHRNPDKAMKCRWAAIPVKDIGDWVLRKLSQNLRAKNRGTGEYYHQGVKEFLSHYELQDLEEELLKWRSDRKSNIPCWVLQNRLAEKLGNKEAVVYIPVRGGRIYFATHKVATGAVSIVFDQKQVWVCNADHVAAANIALTGKGIGEQSSDEENPDGSRIKLQLTS

SEQ ID NO: 2643 - protein, 1054 aa, Artificial Sequence
  Synthetic Construct
MSSAIKSYKSVLRPNERKNQLLKSTIQCLEDGSAFFFKMLQGLFGGITPEIVRFSTEQEKQQQDIALWCAVNWFRPVSQDSLTHTIASDNLVEKFEEYYGGTASDAIKQYFSASIGESYYWNDCRQQYYDLCRELGVEVSDLTHDLEILCREKCLAVATESNQNNSIISVLFGTGEKEDRSVKLRITKKILEAISNLKEIPKNVAPIQEIILNVAKATKETFRQVYAGNLGAPSTLEKFIAKDGQKEFDLKKLQTDLKKVIRGKSKERDWCCQEELRSYVEQNTIQYDLWAWGEMFNKAHTALKIKSTRNYNFAKQRLEQFKEIQSLNNLLVVKKLNDFFDSEFFSGEETYTICVHHLGGKDLSKLYKAWEDDPADPENAIVVLCDDLKNNFKKEPIRNILRYIFTIRQECSAQDILAAAKYNQQLDRYKSQKANPSVLGNQGFTWTNAVILPEKAQRNDRPNSLDLRIWLYLKLRHPDGRWKKHHIPFYDTRFFQEIYAAGNSPVDTCQFRTPRFGYHLPKLTDQTAIRVNKKHVKAAKTEARIRLAIQQGTLPVSNLKITEISATINSKGQVRIPVKFRVGRQKGTLQIGDRFCGYDQNQTASHAYSLWEVVKEGQYHKELGCFVRFISSGDIVSITENRGNQFDQLSYEGLAYPQYADWRKKASKFVSLWQITKKNKKKEIVTVEAKEKFDAICKYQPRLYKFNKEYAYLLRDIVRGKSLVELQQIRQEIFRFIEQDCGVTRLGSLSLSTLETVKAVKGIIYSYFSTALNASKNNPISDEQRKEFDPELFALLEKLELIRTRKKKQKVERIANSLIQTCLENNIKFIRGEGDLSTTNNATKKKANSRSMDWLARGVFNKIRQLAPMHNITLFGCGSLYTSHQDPLVHRNPDKAMKCRWAAIPVKDIGDWVLRKLSQNLRAKNRGTGEYYHQGVKEFLSHYELQDLEEELLKWRSDRKSNIPCWVLQNRLAEKLGNKEAVVYIPVRGGRIYFATHKVATGAVSIVFDQKQVWVCNADHVAAANIALTGKGIGEQSSDEENPDGGRIKLQLTS

SEQ ID NO: 2644 - protein, 1054 aa, Artificial Sequence
  Synthetic Construct
MSSAIKSYKSVLRPNERKNQLLKSTIQCLEDGSAFFFKMLQGLFGGITPEIVRFSTEQEKQQQDIALWCAVNWFRPVSQDSLTHTIASDNLVEKFEEYYGGTASDAIKQYFSASIGESYYWNDCRQQYYDLCRELGVEVSDLTHDLEILCREKCLAVATESNQNNSIISVLFGTGEKEDRSVKLRITKKILEAISNLKEIPKNVAPIQEIILNVAKATKETFRQVYAGNLGAPSTLEKFIAKDGQKEFDLKKLQTDLKKVIRGKSKERDWCCQEELRSYVEQNTIQYDLWAWGEMFNKAHTALKIKSTRNYNFAKQRLEQFKEIQSLNNLLVVKKLNDFFDSEFFSGEETYTICVHHLGGKDLSKLYKAWEDDPADPENAIVVLCDDLKNNFKKEPIRNILRYIFTIRQECSAQDILAAAKYNQQLDRYKSQKANPSVLGNQGFTWTNAVILPEKAQRNDRPNSLDLRIWLYLKLRHPDGRWKKHHIPFYDTRFFQEIYAAGNSPVDTCQFRTPRFGYHLPKLTDQTAIRVNKKHVKAAKTEARIRLAIQQGTLPVSNLKITEISATINSKGQVRIPVKFRVGRQKGTLQIGDRFCGYDQNQTASHAYSLWEVVKEGQYHKELRCRVRFISSGDIVSITENRGNQFDQLSYEGLAYPQYADWRKKASKFVSLWQITKKNKKKEIVTVEAKEKFDAICKYQPRLYKFNKEYAYLLRDIVRGKSLVELQQIRQEIFRFIEQDCGVTRLGSLSLSTLETVKAVKGIIYSYFSTALNASKNNPISDEQRKEFDPELFALLEKLELIRTRKKKQKVERIANSLIQTCLENNIKFIRGEGDLSTTNNATKKKANSRSMDWLARGVFNKIRQLAPMHNITLFGCGSLYTSHQDPLVHRNPDKAMKCRWAAIPVKDIGDWVLRKLSQNLRAKNRGTGEYYHQGVKEFLSHYELQDLEEELLKWRSDRKSNIPCWVLQNRLAEKLGNKEAVVYIPVRGGRIYFATHKVATGAVSIVFDQKQVWVCNADHVAAANIALTGKGIGRQSSDEENPDGGRIKLQLTS

SEQ ID NO: 2645 - protein, 1054 aa, Artificial Sequence
  Synthetic Construct
MSSAIKSYKSVLRPNERKNQLLKSTIQCLEDGSAFFFKMLQGLFGGITPEIVRFSTEQEKQQQDIALWCAVNWFRPVSQDSLTHTIASDNLVEKFEEYYGGTASDAIKQYFSASIGESYYWNDCRQQYYDLCRELGVEVSDLTHDLEILCREKCLAVATESNQNNSIISVLFGTGEKEDRSVKLRITKKILEAISNLKEIPKNVAPIQEIILNVAKATKETFRQVYAGNLGAPSTLEKFIAKDGQKEFDLKKLQTDLKKVIRGKSKERDWCCQEELRSYVEQNTIQYDLWAWGEMFNKAHTALKIKSTRNYNFAKQRLEQFKEIQSLNNLLVVKKLNDFFDSEFFSGEETYTICVHHLGGKDLSKLYKAWEDDPADPENAIVVLCDDLKNNFKKEPIRNILRYIFTIRQECSAQDILAAAKYNQQLDRYKSQKANPSVLGNQGFTWTNAVILPEKAQRNDRPNSLDLRIWLYLKLRHPDGRWKKHHIPFYDTRFFQEIYAAGNSPVDTCQFRTPRFGYHLPKLTDQTAIRVNKKHVKAAKTEARIRLAIQQGTLPVSNLKITEISATINSKGQVRIPVKFRVGRQKGTLQIGDRFCGYDQNQTASHAYSLWEVVKEGQYHKELRCRVRFISSGDIVSITENRGNQFDQLSYEGLAYPQYADWRKKASKFVSLWQITKKNKKKEIVTVEAKEKFDAICKYQPRLYKFNKEYAYLLRDIVRGKSLVELQQIRQEIFRFIEQDCGVTRLGSLSLSTLETVKAVKGIIYSYFSTALNASKNNPISDEQRKEFDPELFALLEKLELIRTRKKKQKVERIANSLIQTCLENNIKFIRGEGDLSTTNNATKKKANSRSMDWLARGVFNKIRQLATMHNITLFGCGSLYTSHQDPLVHRNPDKAMKCRWAAIPVKDIGDWVLRKLSQNLRAKNRGTGEYYHQGVKEFLSHYELQDLEEELLKWRSDRKSNIPCWVLQNRLAEKLGNKEAVVYIPVRGGRIYFATHKVATGAVSIVFDQKQVWVCNADHVAAANIALTGKGIGRQSSDEENPDGGRIKLQLTS

SEQ ID NO: 2646 - DNA, 3222 bp, Artificial Sequence
  Synthetic Construct
atggcttccatctctaggccatacggcaccaagctgcgaccggacgcacggaagaaggagatgctcgataagttctttaatacactgactaagggtcagcgcgtgttcgcagacctggccctgtgcatctatggctccctgaccctggagatggccaagtctctggagccagaaagtgattcagaactggtgtgcgctattgggtggtttcggctggtggacaagaccatctggtccaaggatggcatcaagcaggagaatctggtgaaacagtacgaagcctattccggaaaggaggcttctgaagtggtcaaaacatacctgaacagccccagctccgacaagtacgtgtggatcgattgcaggcagaaattcctgaggtttcagcgcgagctcggcactcgcaacctgtccgaggacttcgaatgtatgctctttgaacagtacattagactgaccaagggcgagatcgaagggtatgccgctatttcaaatatgttcggaaacggcgagaaggaagaccggagcaagaaaagaatgtacgctacacggatgaaagattggctggaggcaaacgaaaatatcacttgggagcagtatagagaggccctgaagaaccagctgaatgctaaaaacctggagcaggttgtggccaattacaaggggaacgctggcggggcagaccccttctttaagtatagcttctccaaagagggaatggtgagcaagaaagaacatgcacagcagctcgacaagttcaaaaccgtcctgaagaacaaagcccgggacctgaattttccaaacaaggagaagctgaagcagtacctggaggccgaaatcggcattccggtcgacgctaacgtgtactcccagatgttctctaacggggtgagtgaggtccagcctaagaccacacggaatatgtcttttagtaacgagaaactggatctgctcactgaactgaaggacctgaacaagggcgatgggttcgagtacgccagagaagtgctgaacgggttctttgactccgagctccacactaccgaggataagtttaatatcacctctaggtacctgggaggcgacaaatcaaaccgcctgagcaaactctataagatctggaagaaagagggtgtggactgcgaggaaggcattcagcagttctgtgaagccgtcaaagataagatgggccagatccccattcgaaatgtgctgaagtacctgtggcagttccgggagacagtcagtgccgaggattttgaagcagccgctaaggctaaccatctggaggaaaagatcagccgggtgaaagcccacccaatcgtgattagcaataggtactgggcttttgggacttccgcactggtgggaaacattatgcccgcagacaagaggcatcagggagagtatgccggtcagaatttcaaaatgtggctggaggctgaactgcactacgatggcaagaaagcaaagcaccatctgcctttttataacgcccgcttctttgaggaagtgtactgctatcacccctctgtcgccgagatcactcctttcaaaaccaagcagtttggctgtgaaatcgggaaggacattccagattacgtgagcgtcgctctgaaggacaatccgtataagaaagcaaccaaacgaatcctgcgtgcaatctacaatcccgtcgccaacacaactggcgttgataagaccacaaactgcagcttcatgatcaaacgcgagaatgacgaatataagctggtcatcaaccgaaaaatttccgtggatcggcctaagagaatcgaagtgggcaggacaattatggggtacgaccgcaatcagacagctagcgatacttattggattggccggctggtgccacctggaacccggggcgcataccgcatcggagagtggagcgtccagtatattaagtccgggcctgtcctgtctagtactcagggagttaacaattccactaccgaccagctggtgtacaacggcatgccatcaagctccgagcggttcaaggcctggaagaaagccagaatggcttttatccgaaaactcattcgtcagctgaatgacgagggactggaatctaagggtcaggattatatccccgagaacccttctagtttcgatgtgcggggcgaaaccctgtacgtctttaacagtaattatctgaaggccctggtgagcaaacacagaaaggccaagaaacctgttgaggggatcctggacgagattgaagcctggacatctaaagacaaggattcatgcagcctgatgcggctgagcagcctgagcgatgcttccatgcagggaatcgccagcctgaagagtctgattaacagctacttcaacaagaatggctgtaaaaccatcgaggacaaagaaaagtttaatcccgtgctgtatgccaagctggttgaggtggaacagcggagaacaaacaagcggtctgagaaagtgggaagaatcgcaggtagtctggagcagctggccctgctgaacggggttgaggtggtcatcggcgaagctgacctgggggaggtcgaaaaaggaaagagtaagaaacagaattcacggaacatggattggtgcgcaaagcaggtggcacagcggctggagtacaaactggccttccatggaatcggttactttggagtgaaccccatgtataccagccaccaggaccctttcgaacataggcgcgtggctgatcacatcgtcatgcgagcacgttttgaggaagtcaacgtggagaacattgccgaatggcacgtgcgaaatttctcaaactacctgcgtgcagacagcggcactgggctgtactataagcaggccaccatggacttcctgaaacattacggtctggaggaacacgctgagggcctggaaaataagaaaatcaagttctatgactttagaaagatcctggaggataaaaacctgacaagcgtgatcattccaaagaggggcgggcgcatctacatggccaccaacccagtgacatccgactctaccccgattacatacgccggcaagacttataataggtgtaacgctgatgaggtggcagccgctaatatcgttatttctgtgctggctccccgcagtaagaaaaacgaggaacaggacgatatccctctgattaccaagaaagccgagagtaagtcaccaccgaaagaccggaagagatcaaaaacaagccagctgcctcagaaa

SEQ ID NO: 2647 - protein, 1074 aa, Artificial Sequence
  Synthetic Construct
MASISRPYGTKLRPDARKKEMLDKFFNTLTKGQRVFADLALCIYGSLTLEMAKSLEPESDSELVCAIGWFRLVDKTIWSKDGIKQENLVKQYEAYSGKEASEVVKTYLNSPSSDKYVWIDCRQKFLRFQRELGTRNLSEDFECMLFEQYIRLTKGEIEGYAAISNMFGNGEKEDRSKKRMYATRMKDWLEANENITWEQYREALKNQLNAKNLEQVVANYKGNAGGADPFFKYSFSKEGMVSKKEHAQQLDKFKTVLKNKARDLNFPNKEKLKQYLEAEIGIPVDANVYSQMFSNGVSEVQPKTTRNMSFSNEKLDLLTELKDLNKGDGFEYAREVLNGFFDSELHTTEDKFNITSRYLGGDKSNRLSKLYKIWKKEGVDCEEGIQQFCEAVKDKMGQIPIRNVLKYLWQFRETVSAEDFEAAAKANHLEEKISRVKAHPIVISNRYWAFGTSALVGNIMPADKRHQGEYAGQNFKMWLEAELHYDGKKAKHHLPFYNARFFEEVYCYHPSVAEITPFKTKQFGCEIGKDIPDYVSVALKDNPYKKATKRILRAIYNPVANTTGVDKTTNCSFMIKRENDEYKLVINRKISVDRPKRIEVGRTIMGYDRNQTASDTYWIGRLVPPGTRGAYRIGEWSVQYIKSGPVLSSTQGVNNSTTDQLVYNGMPSSSERFKAWKKARMAFIRKLIRQLNDEGLESKGQDYIPENPSSFDVRGETLYVFNSNYLKALVSKHRKAKKPVEGILDEIEAWTSKDKDSCSLMRLSSLSDASMQGIASLKSLINSYFNKNGCKTIEDKEKFNPVLYAKLVEVEQRRTNKRSEKVGRIAGSLEQLALLNGVEVVIGEADLGEVEKGKSKKQNSRNMDWCAKQVAQRLEYKLAFHGIGYFGVNPMYTSHQDPFEHRRVADHIVMRARFEEVNVENIAEWHVRNFSNYLRADSGTGLYYKQATMDFLKHYGLEEHAEGLENKKIKFYDFRKILEDKNLTSVIIPKRGGRIYMATNPVTSDSTPITYAGKTYNRCNADEVAAANIVISVLAPRSKKNEEQDDIPLITKKAESKSPPKDRKRSKTSQLPQK

SEQ ID NO: 2648 - protein, 1074 aa, Artificial Sequence
  Synthetic Construct
MASISRPYGTKLRPDARKKEMLDKFFNTLTKGQRVFADLALCIYGSLTLEMAKSLEPESDSELVCAIGWFRLVDKTIWSKDGIKQENLVKQYEAYSGKEASEVVKTYLNSPSSDKYVWIDCRQKFLRFQRELGTRNLSEDFECMLFEQYIRLTKGEIEGYAAISNMFGNGEKEDRSKKRMYATRMKDWLEANENITWEQYREALKNQLNAKNLEQVVANYKGNAGGADPFFKYSFSKEGMVSKKEHAQQLDKFKTVLKNKARDLNFPNKEKLKQYLEAEIGIPVDANVYSQMFSNGVSEVQPKTTRNMSFSNEKLDLLTELKDLNKGDGFEYAREVLNGFFDSELHTTEDKFNITSRYLGGDKSNRLSKLYKIWKKEGVDCEEGIQQFCEAVKDKMGQIPIRNVLKYLWQFRETVSAEDFEAAAKANHLEEKISRVKAHPIVISNRYWAFGTSALVGNIMPADKRHQGEYAGQNFKMWLEAELHYDGKKAKHHLPFYNARFFEEVYCYHPSVAEITPFKTKQFGCEIGKDIPDYVSVALKDNPYKKATKRILRAIYNPVANTTGVDKTTNCSFMIKRENDEYKLVINRKISRDRPKRIEVGRTIMGYDRNQTASDTYWIGRLVPPGTRGAYRIGEWSVQYIKSGPVLSSTQGVNNSTTDQLVYNGMPSSSERFKAWKKARMAFIRKLIRQLNDEGLESKGQDYIPENPSSFDVRGETLYVFNSNYLKALVSKHRKAKKPVEGILDEIEAWTSKDKDSCSLMRLSSLSDASMQGIASLKSLINSYFNKNGCKTIEDKEKFNPVLYAKLVEVEQRRTNKRSEKVGRIAGSLEQLALLNGVEVVIGEADLGEVEKGKSKKQNSRNMDWCAKQVAQRLEYKLAFHGIGYFGVNPMYTSHQDPFEHRRVADHIVMRARFEEVNVENIAEWHVRNFSNYLRADSGTGLYYKQATMDFLKHYGLEEHAEGLENKKIKFYDFRKILEDKNLTSVIIPKRGGRIYMATNPVTSDSTPITYAGKTYNRCNADEVAAANIVISVLAPRSKKNREQDDIPLITKKAESKSPPKDRKRSKTSQLPQK

SEQ ID NO: 2649 - protein, 1074 aa, Artificial Sequence
  Synthetic Construct
MASISRPYGTKLRPDARKKEMLDKFFNTLTKGQRVFADLALCIYGSLTLEMAKSLEPESDSELVCAIGWFRLVDKTIWSKDGIKQENLVKQYEAYSGKEASEVVKTYLNSPSSDKYVWIDCRQKFLRFQRELGTRNLSEDFECMLFEQYIRLTKGEIEGYAAISNMFGNGEKEDRSKKRMYATRMKDWLEANENITWEQYREALKNQLNAKNLEQVVANYKGNAGGADPFFKYSFSKEGMVSKKEHAQQLDKFKTVLKNKARDLNFPNKEKLKQYLEAEIGIPVDANVYSQMFSNGVSEVQPKTTRNMSFSNEKLDLLTELKDLNKGDGFEYAREVLNGFFDSELHTTEDKFNITSRYLGGDKSNRLSKLYKIWKKEGVDCEEGIQQFCEAVKDKMGQIPIRNVLKYLWQFRETVSAEDFEAAAKANHLEEKISRVKAHPIVISNRYWAFGTSALVGNIMPADKRHQGEYAGQNFKMWLRAELHYDGKKAKHHLPFYNARFFEEVYCYHPSVAEITPFKTKQFGCEIGKDIPDYVSVALKDNPYKKATKRILRAIYNPVANTTRVDKTTNCSFMIKRENDEYKLVINRKISRDRPKRIEVGRTIMGYDRNQTASDTYWIGRLVPPGTRGAYRIGEWSVQYIKSGPVLSSTQGVNNSTTDQLVYNGMPSSSERFKAWKKARMAFIRKLIRQLNDEGLESKGQDYIPENPSSFDVRGETLYVFNSNYLKALVSKHRKAKKPVEGILDEIEAWTSKDKDSCSLMRLSSLSDASMQGIASLKSLINSYFNKNGCKTIEDKEKFNPVLYAKLVEVEQRRTNKRSEKVGRIAGSLEQLALLNGVEVVIGEADLGEVEKGKSKKQNSRNMDWCAKQVAQRLEYKLAFHGIGYFGVNPMYTSHQDPFEHRRVADHIVMRARFEEVNVENIAEWHVRNFSNYLRADSGTGLYYKQATMDFLKHYGLEEHAEGLENKKIKFYDFRKILEDKNLTSVIIPKRGGRIYMATNPVTSDSTPITYAGKTYNRCNADEVAAANIVISVLAPRSKKNREQDDIPLITKKAESKSPPKDRKRSKTSQLPQK

SEQ ID NO: 2650 - protein, 1093 aa, Artificial Sequence
  Synthetic Construct
MSNKEKNASETRKAYTTKMIPRSHDRMKLLGNFMDYLMDGTPIFFELWNQFGGGIDRDIISGTANKDKISDDLLLAVNWFKVMPINSKPQGVSPSNLANLFQQYSGSEPDIQAQEYFASNFDTEKHQWKDMRVEYERLLAELQLSRSDMHHDLKLMYKEKCIGLSLSTAHYITSVMFGTGAKNNRQTKHQFYSKVIQLLEESTQINSVEQLASIILKAGDCDSYRKLRIRCSRKGATPSILKIVQDYELGTNHDDEVNVPSLIANLKEKLGRFEYECEWKCMEKIKAFLASKVGPYYLGSYSAMLENALSPIKGMTTKNCKFVLKQIDAKNDIKYENEPFGKIVEGFFDSPYFESDTNVKWVLHPHHIGESNIKTLWEDLNAIHSKYEEDIASLSEDKKEKRIKVYQGDVCQTINTYCEEVGKEAKTPLVQLLRYLYSRKDDIAVDKIIDGITFLSKKHKVEKQKINPVIQKYPSFNFGNNSKLLGKIISPKDKLKHNLKCNRNQVDNYIWIEIKVLNTKTMRWEKHHYALSSTRFLEEVYYPATSENPPDALAARFRTKTNGYEGKPALSAEQIEQIRSAPVGLRKVKKRQMRLEAARQQNLLPRYTWGKDFNINICKRGNNFEVTLATKVKKKKEKNYKVVLGYDANIVRKNTYAAIEAHANGDGVIDYNDLPVKPIESGFVTVESQVRDKSYDQLSYNGVKLLYCKPHVESRRSFLEKYRNGTMKDNRGNNIQIDFMKDFEAIADDETSLYYFNMKYCKLLQSSIRNHSSQAKEYREEIFELLRDGKLSVLKLSSLSNLSFVMFKVAKSLIGTYFGHLLKKPKNSKSDVKAPPITDEDKQKADPEMFALRLALEEKRLNKVKSKKEVIANKIVAKALELRDKYGPVLIKGENISDTTKKGKKSSTNSFLMDWLARGVANKVKEMVMMHQGLEFVEVNPNFTSHQDPFVHKNPENTFRARYSRCTPSELTEKNRKEILSFLSDKPSKRPTNAYYNEGAMAFLATYGLKKNDVLGVSLEKFKQIMANILHQRSEDQLLFPSRGGMFYLATYKLDADATSVNWNGKQFWVCNADLVAAYNVGLVDIQKDFKKK

SEQ ID NO: 2651 - protein, 1098 aa, Artificial Sequence
  Synthetic Construct
MSISNNNILPYNPKLLPDDRKHKMLVDTFNQLDLIRNNLHDMIIALYGALKYDNIKQFASKEKPHISADALCSINWFRLVKTNERKPAIESNQIISKFIQYSGHTPDKYALSHITGNHEPSHKWIDCREYAINYARIMHLSFSQFQDLATACLNCKILILNGTLTSSWAWGANSALFGGSDKENFSVKAKILNSFIENLKDEMNTTKFQVVEKVCQQIGSSDAADLFDLYRSTVKDGNRGPATGRNPKVMNLFSQDGEISSEQREDFIESFQKVMQEKNSKQIIPHLDKLKYHLVKQSGLYDIYSWAAAIKNANSTIVASNSSNLNTILNKTEKQQTFEELRKDEKIVACSKILLSVNDTLPEDLHYNPSTSNLGKNLDVFFDLLNENSVHTIENKEEKNKIVKECVNQYMEECKGLNKPPMPVLLTFISDYAHKHQAQDFLSAAKMNFIDLKIKSIKVVPTVHGSSPYTWISNLSKKNKDGKMIRTPNSSLIGWIIPPEEIHDQKFAGQNPIIWAVLRVYCNNKWEMHHFPFSDSRFFTEVYAYKPNLPYLPGGENRSKRFGYRHSTNLSNESRQILLDKSKYAKANKSVLRCMENMTHNVVFDPKTSLNIRIKTDKNNSPVLDDKGRITFVMQINHRILEKYNNTKIEIGDRILAYDQNQSENHTYAILQRTEEGSHAHQFNGWYVRVLETGKVTSIVQGLSGPIDQLNYDGMPVTSHKFNCWQADRSAFVSQFASLKISETETFDEAYQAINAQGAYTWNLFYLRILRKALRVCHMENINQFREEILAISKNRLSPMSLGSLSQNSLKMIRAFKSIINCYMSRMSFVDELQKKEGDLELHTIMRLTDNKLNDKRVEKINRASSFLTNKAHSMGCKMIVGESDLPVADSKTSKKQNVDRMDWCARALSHKVEYACKLMGLAYRGIPAYMSSHQDPLVHLVESKRSVLRPRFVVADKSDVKQHHLDNLRRMLNSKTKVGTAVYYREAVELMCEELGIHKTDMAKGKVSLSDFVDKFIGEKAIFPQRGGRFYMSTKRLTTGAKLICYSGSDVWLSDADEIAAINIGMFVVCDQTGAFKKKKKEKLDDEECDILPFRPM

SEQ ID NO: 2652 - RNA, 36 nt, Artificial Sequence
  Synthetic Construct
ucucaacgauagucagacauguguccucagugacac

SEQ ID NO: 2653 - RNA, 36 nt, Artificial Sequence
  Synthetic Construct
uuuuaacaacacucaggcauguguccacagugacac

SEQ ID NO: 2654 - RNA, 36 nt, Artificial Sequence
  Synthetic Construct
uugaacggauacucagacauguguuuccagugacac

SEQ ID NO: 2655 - RNA, 36 nt, Artificial Sequence
  Synthetic Construct
ugcccucaauagucagauguguguccacagugacac

SEQ ID NO: 2656 - RNA, 36 nt, Artificial Sequence
  Synthetic Construct
ucucaaugauacuuagauacguguccucagugacac

SEQ ID NO: 2657 - RNA, 36 nt, Artificial Sequence
  Synthetic Construct
ucucaaugauacucagacauguguccccagugacac

SEQ ID NO: 2658 - RNA, 36 nt, Artificial Sequence
  Synthetic Construct
ucucaaugauacuaagacauguguccucagugacac

SEQ ID NO: 2659 - RNA, 36 nt, Artificial Sequence
  Synthetic Construct
ucucaacuauacucagacauguguccucagugacac

SEQ ID NO: 2660 - RNA, 36 nt, Artificial Sequence
  Synthetic Construct
ucucaacgauacucagacauguguccucagugacac

SEQ ID NO: 2661 - RNA, 36 nt, Artificial Sequence
  Synthetic Construct
ucucaacgauacuaagauauguguccucagcgacac

SEQ ID NO: 2662 - RNA, 36 nt, Artificial Sequence
  Synthetic Construct
ucucaacgauacuaagauauguguccccagugacac

SEQ ID NO: 2663 - RNA, 36 nt, Artificial Sequence
  Synthetic Construct
ucucaacgauacuaagauauguguccacagugacac

SEQ ID NO: 2664 - RNA, 36 nt, Artificial Sequence
  Synthetic Construct
ucucaacaauacucagacauguguccccagugacac

SEQ ID NO: 2665 - RNA, 36 nt, Artificial Sequence
  Synthetic Construct
ucucaacaauacuaaggcauguguccccagugaccc

SEQ ID NO: 2666 - RNA, 36 nt, Artificial Sequence
  Synthetic Construct
ucucaaagauacucagacacguguccccagugacac

SEQ ID NO: 2667 - RNA, 36 nt, Artificial Sequence
  Synthetic Construct
ucucaaaaauacucagacauguguccucagugacac

SEQ ID NO: 2668 - RNA, 36 nt, Artificial Sequence
  Synthetic Construct
gcgaaacaacagucagacauguguccccagugacac

SEQ ID NO: 2669 - RNA, 36 nt, Artificial Sequence
  Synthetic Construct
ccucaacgauauuaagacauguguccgcagugacac

SEQ ID NO: 2670 - RNA, 22 nt, Artificial Sequence
  Synthetic Construct
agacauguguccucagugacac

SEQ ID NO: 2671 - RNA, 36 nt, Artificial Sequence
  Synthetic Construct
guuggaaugacuaauuuuugugcccaccguuggcac

SEQ ID NO: 2672 - RNA, 24 nt, Artificial Sequence
  Synthetic Construct
aauuuuugugcccaucguuggcac

SEQ ID NO: 2673 - RNA, 23 nt, Artificial Sequence
  Synthetic Construct
auuuuugugcccaucguuggcac

SEQ ID NO: 2674 - RNA, 36 nt, Artificial Sequence
  Synthetic Construct
cuagcaaugaccuaauaguguguccuuaguugacau

SEQ ID NO: 2675 - RNA, 36 nt, Artificial Sequence
  Synthetic Construct
ccuacaauaccuaagaaauccguccuaaguugacgg

SEQ ID NO: 2676 - RNA, 22 nt, Artificial Sequence
  Synthetic Construct
auaguguguccuuaguugacau

SEQ ID NO: 2677 - RNA, 43 nt, Artificial Sequence
  Synthetic Construct
agaaauccgucuuucauugacgggaagcuagucuagugcaagc

SEQ ID NO: 2678 - RNA, 43 nt, Artificial Sequence
  Synthetic Construct
agaaauccgucuuucauugacggcuggagccugugauaaaagc

SEQ ID NO: 2679 - RNA, 43 nt, Artificial Sequence
  Synthetic Construct
agaaauccgucuuucauugacgguaccccacccacgcccccac

SEQ ID NO: 2680 - RNA, 100 nt, Artificial Sequence
  Synthetic Construct
  misc_feature (1)..(4): The linkages between nucleotides at positions 1, 2, 3, and 4 are phosphorothioate linkages
  modified_base (1)..(1): cm
  modified_base (2)..(2): um
  modified_base (3)..(3): 2'-O-methyladenosine
  misc_feature (97)..(100): The linkages between nucleotides at positions 97, 98, 99, and 100 are phosphorothioate linkages
  modified_base (97)..(99): um
cuaacaguugcuuuuaucacguuuuagagcuagaaauagcaaguuaaaauaaggcuaguccguuaucaacuugaaaaaguggcaccgagucggugcuuuu

What is claimed is:

1. A composition comprising an RNA guide, wherein the RNA guide comprises (i) a spacer sequence that is substantially complementary to a target sequence within a BCL11A gene and (ii) a direct repeat sequence; wherein the target sequence is adjacent to a protospacer adjacent motif (PAM) comprising the sequence 5′-NTTN-3′.

2. The composition of claim 1, wherein the target sequence is within exon 1, exon 2, exon 3, exon 4, or the enhancer region of the BCL11A gene.

3. The composition of claim 1 or 2, wherein the BCL11A gene comprises the sequence of SEQ ID NO: 2635, the reverse complement of SEQ ID NO: 2635, a variant of SEQ ID NO: 2635, or the reverse complement of a variant of SEQ ID NO: 2635.

4. The composition of any one of claims 1 to 3, wherein the spacer sequence comprises:
a. nucleotide 1 through nucleotide 16 of a sequence that is at least 90% identical to a sequence of any one of SEQ ID NOs: 1322-2632;
b. nucleotide 1 through nucleotide 17 of a sequence that is at least 90% identical to a sequence of any one of SEQ ID NOs: 1322-2632;
c. nucleotide 1 through nucleotide 18 of a sequence that is at least 90% identical to a sequence of any one of SEQ ID NOs: 1322-2632;
d. nucleotide 1 through nucleotide 19 of a sequence that is at least 90% identical to a sequence of any one of SEQ ID NOs: 1322-2632;
e. nucleotide 1 through nucleotide 20 of a sequence that is at least 90% identical to a sequence of any one of SEQ ID NOs: 1322-2632;
f. nucleotide 1 through nucleotide 21 of a sequence that is at least 90% identical to a sequence of any one of SEQ ID NOs: 1322-2632;
g. nucleotide 1 through nucleotide 22 of a sequence that is at least 90% identical to a sequence of any one of SEQ ID NOs: 1322-2632;
h. nucleotide 1 through nucleotide 23 of a sequence that is at least 90% identical to a sequence of any one of SEQ ID NOs: 1322-2632;
i. nucleotide 1 through nucleotide 24 of a sequence that is at least 90% identical to a sequence of any one of SEQ ID NOs: 1322-2632;
j. nucleotide 1 through nucleotide 25 of a sequence that is at least 90% identical to a sequence of any one of SEQ ID NOs: 1322-2632;
k. nucleotide 1 through nucleotide 26 of a sequence that is at least 90% identical to a sequence of any one of SEQ ID NOs: 1322-2632;
l. nucleotide 1 through nucleotide 27 of a sequence that is at least 90% identical to a sequence of any one of SEQ ID NOs: 1322-2632;
m. nucleotide 1 through nucleotide 28 of a sequence that is at least 90% identical to a sequence of any one of SEQ ID NOs: 1322-2632;
n. nucleotide 1 through nucleotide 29 of a sequence that is at least 90% identical to a sequence of any one of SEQ ID NOs: 1322-1425 and 1427-2632; or
o. nucleotide 1 through nucleotide 30 of a sequence that is at least 90% identical to a sequence of any one of SEQ ID NOs: 1322-1425 and 1427-2632.

5. The composition of any one of claims 1 to 4, wherein the spacer sequence comprises:
a. nucleotide 1 through nucleotide 16 of any one of SEQ ID NOs: 1322-2632;
b. nucleotide 1 through nucleotide 17 of any one of SEQ ID NOs: 1322-2632;
c. nucleotide 1 through nucleotide 18 of any one of SEQ ID NOs: 1322-2632;
d. nucleotide 1 through nucleotide 19 of any one of SEQ ID NOs: 1322-2632;
e. nucleotide 1 through nucleotide 20 of any one of SEQ ID NOs: 1322-2632;
f. nucleotide 1 through nucleotide 21 of any one of SEQ ID NOs: 1322-2632;
g. nucleotide 1 through nucleotide 22 of any one of SEQ ID NOs: 1322-2632;
h. nucleotide 1 through nucleotide 23 of any one of SEQ ID NOs: 1322-2632;
i. nucleotide 1 through nucleotide 24 of any one of SEQ ID NOs: 1322-2632;
j. nucleotide 1 through nucleotide 25 of any one of SEQ ID NOs: 1322-2632;
k. nucleotide 1 through nucleotide 26 of any one of SEQ ID NOs: 1322-2632;
l. nucleotide 1 through nucleotide 27 of any one of SEQ ID NOs: 1322-2632;
m. nucleotide 1 through nucleotide 28 of any one of SEQ ID NOs: 1322-2632;
n. nucleotide 1 through nucleotide 29 of any one of SEQ ID NOs: 1322-1425 and 1427-2632; or
o. nucleotide 1 through nucleotide 30 of any one of SEQ ID NOs: 1322-1425 and 1427-2632.

6. The composition of any one of claims 1 to 5, wherein the direct repeat comprises:
a. nucleotide 1 through nucleotide 36 of a sequence that is at least 90% identical to a sequence of any one of SEQ ID NOs: 1-8;
b. nucleotide 2 through nucleotide 36 of a sequence that is at least 90% identical to a sequence of any one of SEQ ID NOs: 1-8;
c. nucleotide 3 through nucleotide 36 of a sequence that is at least 90% identical to a sequence of any one of SEQ ID NOs: 1-8;
d. nucleotide 4 through nucleotide 36 of a sequence that is at least 90% identical to a sequence of any one of SEQ ID NOs: 1-8;
e. nucleotide 5 through nucleotide 36 of a sequence that is at least 90% identical to a sequence of any one of SEQ ID NOs: 1-8;
f. nucleotide 6 through nucleotide 36 of a sequence that is at least 90% identical to a sequence of any one of SEQ ID NOs: 1-8;
g. nucleotide 7 through nucleotide 36 of a sequence that is at least 90% identical to a sequence of any one of SEQ ID NOs: 1-8;
h. nucleotide 8 through nucleotide 36 of a sequence that is at least 90% identical to a sequence of any one of SEQ ID NOs: 1-8;
i. nucleotide 9 through nucleotide 36 of a sequence that is at least 90% identical to a sequence of any one of SEQ ID NOs: 1-8;
j. nucleotide 10 through nucleotide 36 of a sequence that is at least 90% identical to a sequence of any one of SEQ ID NOs: 1-8;
k. nucleotide 11 through nucleotide 36 of a sequence that is at least 90% identical to a sequence of any one of SEQ ID NOs: 1-8;
l. nucleotide 12 through nucleotide 36 of a sequence that is at least 90% identical to a sequence of any one of SEQ ID NOs: 1-8;
m. nucleotide 13 through nucleotide 36 of a sequence that is at least 90% identical to a sequence of any one of SEQ ID NOs: 1-8;
n. nucleotide 14 through nucleotide 36 of a sequence that is at least 90% identical to a sequence of any one of SEQ ID NOs: 1-8;
o. nucleotide 1 through nucleotide 34 of a sequence that is at least 90% identical to a sequence of SEQ ID NO: 9;
p. nucleotide 2 through nucleotide 34 of a sequence that is at least 90% identical to a sequence of SEQ ID NO: 9;
q. nucleotide 3 through nucleotide 34 of a sequence that is at least 90% identical to a sequence of SEQ ID NO: 9;
r. nucleotide 4 through nucleotide 34 of a sequence that is at least 90% identical to a sequence of SEQ ID NO: 9;
s. nucleotide 5 through nucleotide 34 of a sequence that is at least 90% identical to a sequence of SEQ ID NO:9;
t. nucleotide 6 through nucleotide 34 of a sequence that is at least 90% identical to a sequence of SEQ ID NO: 9;
u. nucleotide 7 through nucleotide 34 of a sequence that is at least 90% identical to a sequence of SEQ ID NO: 9;
v. nucleotide 8 through nucleotide 34 of a sequence that is at least 90% identical to a sequence of SEQ ID NO: 9;
w. nucleotide 9 through nucleotide 34 of a sequence that is at least 90% identical to a sequence of SEQ ID NO: 9;
x. nucleotide 10 through nucleotide 34 of a sequence that is at least 90% identical to a sequence of SEQ ID NO: 9;
y. nucleotide 11 through nucleotide 34 of a sequence that is at least 90% identical to a sequence of SEQ ID NO: 9;
z. nucleotide 12 through nucleotide 34 of a sequence that is at least 90% identical to a sequence of SEQ ID NO: 9; or
aa. a sequence that is at least 90% identical to a sequence of SEQ ID NO: 10 or a portion thereof.

7. The composition of any one of claims 1 to 6, wherein the direct repeat comprises:
a. nucleotide 1 through nucleotide 36 of any one of SEQ ID NOs: 1-8;
b. nucleotide 2 through nucleotide 36 of any one of SEQ ID NOs: 1-8;
c. nucleotide 3 through nucleotide 36 of any one of SEQ ID NOs: 1-8;
d. nucleotide 4 through nucleotide 36 of any one of SEQ ID NOs: 1-8;
e. nucleotide 5 through nucleotide 36 of any one of SEQ ID NOs: 1-8;
f. nucleotide 6 through nucleotide 36 of any one of SEQ ID NOs: 1-8;
g. nucleotide 7 through nucleotide 36 of any one of SEQ ID NOs: 1-8;
h. nucleotide 8 through nucleotide 36 of any one of SEQ ID NOs: 1-8;
i. nucleotide 9 through nucleotide 36 of any one of SEQ ID NOs: 1-8;
j. nucleotide 10 through nucleotide 36 of any one of SEQ ID NOs: 1-8;
k. nucleotide 11 through nucleotide 36 of any one of SEQ ID NOs: 1-8;
l. nucleotide 12 through nucleotide 36 of any one of SEQ ID NOs: 1-8;
m. nucleotide 13 through nucleotide 36 of any one of SEQ ID NOs: 1-8;
n. nucleotide 14 through nucleotide 36 of any one of SEQ ID NOs: 1-8;
o. nucleotide 1 through nucleotide 34 of SEQ ID NO: 9;
p. nucleotide 2 through nucleotide 34 of SEQ ID NO: 9;
q. nucleotide 3 through nucleotide 34 of SEQ ID NO: 9;
r. nucleotide 4 through nucleotide 34 of SEQ ID NO: 9;
s. nucleotide 5 through nucleotide 34 of SEQ ID NO: 9;
t. nucleotide 6 through nucleotide 34 of SEQ ID NO: 9;
u. nucleotide 7 through nucleotide 34 of SEQ ID NO: 9;
v. nucleotide 8 through nucleotide 34 of SEQ ID NO: 9;
w. nucleotide 9 through nucleotide 34 of SEQ ID NO: 9;
x. nucleotide 10 through nucleotide 34 of SEQ ID NO: 9;
y. nucleotide 11 through nucleotide 34 of SEQ ID NO: 9;
z. nucleotide 12 through nucleotide 34 of SEQ ID NO: 9; or
aa. SEQ ID NO: 10 or a portion thereof.

8. The composition of any one of claims 1 to 5, wherein the direct repeat comprises:
a. nucleotide 1 through nucleotide 36 of a sequence that is at least 90% identical to a sequence of any one of SEQ ID NOs: 2652-2669;
b. nucleotide 2 through nucleotide 36 of a sequence that is at least 90% identical to a sequence of any one of SEQ ID NOs: 2652-2669;
c. nucleotide 3 through nucleotide 36 of a sequence that is at least 90% identical to a sequence of any one of SEQ ID NOs: 2652-2669;
d. nucleotide 4 through nucleotide 36 of a sequence that is at least 90% identical to a sequence of any one of SEQ ID NOs: 2652-2669;
e. nucleotide 5 through nucleotide 36 of a sequence that is at least 90% identical to a sequence of any one of SEQ ID NOs: 2652-2669;
f. nucleotide 6 through nucleotide 36 of a sequence that is at least 90% identical to a sequence of any one of SEQ ID NOs: 2652-2669;
g. nucleotide 7 through nucleotide 36 of a sequence that is at least 90% identical to a sequence of any one of SEQ ID NOs: 2652-2669;
h. nucleotide 8 through nucleotide 36 of a sequence that is at least 90% identical to a sequence of any one of SEQ ID NOs: 2652-2669;
i. nucleotide 9 through nucleotide 36 of a sequence that is at least 90% identical to a sequence of any one of SEQ ID NOs: 2652-2669;
j. nucleotide 10 through nucleotide 36 of a sequence that is at least 90% identical to a sequence of any one of SEQ ID NOs: 2652-2669;
k. nucleotide 11 through nucleotide 36 of a sequence that is at least 90% identical to a sequence of any one of SEQ ID NOs: 2652-2669;
l. nucleotide 12 through nucleotide 36 of a sequence that is at least 90% identical to a sequence of any one of SEQ ID NOs: 2652-2669;
m. nucleotide 13 through nucleotide 36 of a sequence that is at least 90% identical to a sequence of any one of SEQ ID NOs: 2652-2669;
n. nucleotide 14 through nucleotide 36 of a sequence that is at least 90% identical to a sequence of any one of SEQ ID NOs: 2652-2669; or
o. a sequence that is at least 90% identical to a sequence of SEQ ID NO: 2670 or a portion thereof.

9. The composition of any one of claims 1 to 5 or 8, wherein the direct repeat comprises:
a. nucleotide 1 through nucleotide 36 of any one of SEQ ID NOs: 2652-2669;
b. nucleotide 2 through nucleotide 36 of any one of SEQ ID NOs: 2652-2669;
c. nucleotide 3 through nucleotide 36 of any one of SEQ ID NOs: 2652-2669;
d. nucleotide 4 through nucleotide 36 of any one of SEQ ID NOs: 2652-2669;
e. nucleotide 5 through nucleotide 36 of any one of SEQ ID NOs: 2652-2669;
f. nucleotide 6 through nucleotide 36 of any one of SEQ ID NOs: 2652-2669;
g. nucleotide 7 through nucleotide 36 of any one of SEQ ID NOs: 2652-2669;
h. nucleotide 8 through nucleotide 36 of any one of SEQ ID NOs: 2652-2669;
i. nucleotide 9 through nucleotide 36 of any one of SEQ ID NOs: 2652-2669;
j. nucleotide 10 through nucleotide 36 of any one of SEQ ID NOs: 2652-2669;
k. nucleotide 11 through nucleotide 36 of any one of SEQ ID NOs: 2652-2669;
l. nucleotide 12 through nucleotide 36 of any one of SEQ ID NOs: 2652-2669;
m. nucleotide 13 through nucleotide 36 of any one of SEQ ID NOs: 2652-2669;
n. nucleotide 14 through nucleotide 36 of any one of SEQ ID NOs: 2652-2669; or
o. SEQ ID NO: 2670 or a portion thereof.

10. The composition of any one of claims 1 to 5, wherein the direct repeat comprises:
a. nucleotide 1 through nucleotide 36 of a sequence that is at least 90% identical to SEQ ID NO: 2671;
b. nucleotide 2 through nucleotide 36 of a sequence that is at least 90% identical to SEQ ID NO: 2671;
c. nucleotide 3 through nucleotide 36 of a sequence that is at least 90% identical to SEQ ID NO: 2671;
d. nucleotide 4 through nucleotide 36 of a sequence that is at least 90% identical to SEQ ID NO: 2671;
e. nucleotide 5 through nucleotide 36 of a sequence that is at least 90% identical to SEQ ID NO: 2671;
f. nucleotide 6 through nucleotide 36 of a sequence that is at least 90% identical to SEQ ID NO: 2671;
g. nucleotide 7 through nucleotide 36 of a sequence that is at least 90% identical to SEQ ID NO: 2671;
h. nucleotide 8 through nucleotide 36 of a sequence that is at least 90% identical to SEQ ID NO: 2671;
i. nucleotide 9 through nucleotide 36 of a sequence that is at least 90% identical to SEQ ID NO: 2671;
j. nucleotide 10 through nucleotide 36 of a sequence that is at least 90% identical to SEQ ID NO: 2671;
k. nucleotide 11 through nucleotide 36 of a sequence that is at least 90% identical to SEQ ID NO: 2671;
l. nucleotide 12 through nucleotide 36 of a sequence that is at least 90% identical to SEQ ID NO: 2671;
m. nucleotide 13 through nucleotide 36 of a sequence that is at least 90% identical to SEQ ID NO: 2671;
n. nucleotide 14 through nucleotide 36 of a sequence that is at least 90% identical to SEQ ID NO: 2671; or
o. a sequence that is at least 90% identical to a sequence of SEQ ID NO: 2672 or SEQ ID NO: 2673 or a portion thereof.

11. The composition of any one of claims 1 to 5 or 10, wherein the direct repeat comprises:
a. nucleotide 1 through nucleotide 36 of SEQ ID NO: 2671;
b. nucleotide 2 through nucleotide 36 of SEQ ID NO: 2671;
c. nucleotide 3 through nucleotide 36 of SEQ ID NO: 2671;
d. nucleotide 4 through nucleotide 36 of SEQ ID NO: 2671;
e. nucleotide 5 through nucleotide 36 of SEQ ID NO: 2671;
f. nucleotide 6 through nucleotide 36 of SEQ ID NO: 2671;
g. nucleotide 7 through nucleotide 36 of SEQ ID NO: 2671;
h. nucleotide 8 through nucleotide 36 of SEQ ID NO: 2671;
i. nucleotide 9 through nucleotide 36 of SEQ ID NO: 2671;
j. nucleotide 10 through nucleotide 36 of SEQ ID NO: 2671;
k. nucleotide 11 through nucleotide 36 of SEQ ID NO: 2671;
l. nucleotide 12 through nucleotide 36 of SEQ ID NO: 2671;
m. nucleotide 13 through nucleotide 36 of SEQ ID NO: 2671;
n. nucleotide 14 through nucleotide 36 of SEQ ID NO: 2671; or
o. SEQ ID NO: 2672 or SEQ ID NO: 2673 or a portion thereof.

12. The composition of any one of claims 1 to 5, wherein the direct repeat comprises:
a. nucleotide 1 through nucleotide 36 of a sequence that is at least 90% identical to a sequence of SEQ ID NO: 2674 or SEQ ID NO: 2675;
b. nucleotide 2 through nucleotide 36 of a sequence that is at least 90% identical to a sequence of SEQ ID NO: 2674 or SEQ ID NO: 2675;
c. nucleotide 3 through nucleotide 36 of a sequence that is at least 90% identical to a sequence of SEQ ID NO: 2674 or SEQ ID NO: 2675;
d. nucleotide 4 through nucleotide 36 of a sequence that is at least 90% identical to a sequence of SEQ ID NO: 2674 or SEQ ID NO: 2675;
e. nucleotide 5 through nucleotide 36 of a sequence that is at least 90% identical to a sequence of SEQ ID NO: 2674 or SEQ ID NO: 2675;
f. nucleotide 6 through nucleotide 36 of a sequence that is at least 90% identical to a sequence of SEQ ID NO: 2674 or SEQ ID NO: 2675;
g. nucleotide 7 through nucleotide 36 of a sequence that is at least 90% identical to a sequence of SEQ ID NO: 2674 or SEQ ID NO: 2675;
h. nucleotide 8 through nucleotide 36 of a sequence that is at least 90% identical to a sequence of SEQ ID NO: 2674 or SEQ ID NO: 2675;
i. nucleotide 9 through nucleotide 36 of a sequence that is at least 90% identical to a sequence of SEQ ID NO: 2674 or SEQ ID NO: 2675;
j. nucleotide 10 through nucleotide 36 of a sequence that is at least 90% identical to a sequence of SEQ ID NO: 2674 or SEQ ID NO: 2675;
k. nucleotide 11 through nucleotide 36 of a sequence that is at least 90% identical to a sequence of SEQ ID NO: 2674 or SEQ ID NO: 2675;
l. nucleotide 12 through nucleotide 36 of a sequence that is at least 90% identical to a sequence of SEQ ID NO: 2674 or SEQ ID NO: 2675;
m. nucleotide 13 through nucleotide 36 of a sequence that is at least 90% identical to a sequence of SEQ ID NO: 2674 or SEQ ID NO: 2675;
n. nucleotide 14 through nucleotide 36 of a sequence that is at least 90% identical to a sequence of SEQ ID NO: 2674 or SEQ ID NO: 2675;
o. nucleotide 15 through nucleotide 36 of a sequence that is at least 90% identical to a sequence of SEQ ID NO: 2674 or SEQ ID NO: 2675; or
p. a sequence that is at least 90% identical to a sequence of SEQ ID NO: 2676 or a portion thereof.

13. The composition of any one of claims 1 to 5 or 12, wherein the direct repeat comprises:
a. nucleotide 1 through nucleotide 36 of SEQ ID NO: 2674 or SEQ ID NO: 2675;
b. nucleotide 2 through nucleotide 36 of SEQ ID NO: 2674 or SEQ ID NO: 2675;
c. nucleotide 3 through nucleotide 36 of SEQ ID NO: 2674 or SEQ ID NO: 2675;
d. nucleotide 4 through nucleotide 36 of SEQ ID NO: 2674 or SEQ ID NO: 2675;
e. nucleotide 5 through nucleotide 36 of SEQ ID NO: 2674 or SEQ ID NO: 2675;
f. nucleotide 6 through nucleotide 36 of SEQ ID NO: 2674 or SEQ ID NO: 2675;
g. nucleotide 7 through nucleotide 36 of SEQ ID NO: 2674 or SEQ ID NO: 2675;
h. nucleotide 8 through nucleotide 36 of SEQ ID NO: 2674 or SEQ ID NO: 2675;
i. nucleotide 9 through nucleotide 36 of SEQ ID NO: 2674 or SEQ ID NO: 2675;
j. nucleotide 10 through nucleotide 36 of SEQ ID NO: 2674 or SEQ ID NO: 2675;
k. nucleotide 11 through nucleotide 36 of SEQ ID NO: 2674 or SEQ ID NO: 2675;
l. nucleotide 12 through nucleotide 36 of SEQ ID NO: 2674 or SEQ ID NO: 2675;
m. nucleotide 13 through nucleotide 36 of SEQ ID NO: 2674 or SEQ ID NO: 2675;
n. nucleotide 14 through nucleotide 36 of SEQ ID NO: 2674 or SEQ ID NO: 2675;
o. nucleotide 15 through nucleotide 36 of SEQ ID NO: 2674 or SEQ ID NO: 2675; or
p. SEQ ID NO: 2676 or a portion thereof.

14. The composition of any one of claims 1 to 13, wherein the spacer sequence is substantially complementary to the complement of a sequence of any one of SEQ ID NOs: 11-1321.

15. The composition of claim 1, wherein the PAM comprises the sequence 5′-ATTA-3′, 5′-ATTT-3′, 5′-ATTG-3′, 5′-ATTC-3′, 5′-TTTA-3′, 5′-TTTT-3′, 5′-TTTG-3′, 5′-TTTC-3′, 5′-GTTA-3′, 5′-GTTT-3′, 5′-GTTG-3′, 5′-GTTC-3′, 5′-CTTA-3′, 5′-CTTT-3′, 5′-CTTG-3′, or 5′-CTTC-3′.

16. The composition of claim 1 or 15, wherein the target sequence is immediately adjacent to the PAM sequence.

17. The composition of any one of claims 1 to 16, wherein the composition further comprises a Cas12i polypeptide.

18. The composition of claim 17, wherein the Cas12i polypeptide is:
a. a Cas12i2 polypeptide comprising a sequence that is at least 90% identical to the sequence of SEQ ID NO: 2634, SEQ ID NO: 2641, SEQ ID NO: 2642, SEQ ID NO: 2643, SEQ ID NO: 2644, or SEQ ID NO: 2645;
b. a Cas12i4 polypeptide comprising a sequence that is at least 90% identical to the sequence of SEQ ID NO: 2647, SEQ ID NO: 2648, or SEQ ID NO: 2649;
c. a Cas12i1 polypeptide comprising a sequence that is at least 90% identical to the sequence of SEQ ID NO: 2650; or
d. a Cas12i3 polypeptide comprising a sequence that is at least 90% identical to the sequence of SEQ ID NO: 2651.

19. The composition of claim 18, wherein the Cas12i polypeptide is:
a. a Cas12i2 polypeptide comprising a sequence of SEQ ID NO: 2634, SEQ ID NO: 2641, SEQ ID NO: 2642, SEQ ID NO: 2643, SEQ ID NO: 2644, or SEQ ID NO: 2645;
b. a Cas12i4 polypeptide comprising a sequence of SEQ ID NO: 2647, SEQ ID NO: 2648, or SEQ ID NO: 2649;
c. a Cas12i1 polypeptide comprising a sequence of SEQ ID NO: 2650; or
d. a Cas12i3 polypeptide comprising a sequence of SEQ ID NO: 2651.

20. The composition of any one of claims 17 to 19, wherein the RNA guide and the Cas12i polypeptide form a ribonucleoprotein complex.

21. The composition of claim 20, wherein the ribonucleoprotein complex binds a target nucleic acid.

22. The composition of claim 20 or 21, wherein the composition is present within a cell.

23. The composition of any one of claims 17 to 22, wherein the RNA guide and the Cas12i polypeptide are encoded in a vector, e.g., expression vector.

24. The composition of claim 23, wherein the RNA guide and the Cas12i polypeptide are encoded in a single vector or the RNA guide is encoded in a first vector and the Cas12i polypeptide is encoded in a second vector.

25. An RNA guide comprising (i) a spacer sequence that is substantially complementary to a target sequence within a BCL11A gene and (ii) a direct repeat sequence.

26. The RNA guide of claim 25, wherein the target sequence is within exon 1, exon 2, exon 3, exon 4, or the enhancer region of the BCL11A gene.

27. The RNA guide of claim 25 or 26, wherein the BCL11A gene comprises the sequence of SEQ ID NO: 2635, the reverse complement of SEQ ID NO: 2635, a variant of SEQ ID NO: 2635, or the reverse complement of SEQ ID NO: 2635.

28. The RNA guide of any one of claims 25 to 27, wherein the spacer sequence comprises:
a. nucleotide 1 through nucleotide 16 of a sequence that is at least 90% identical to a sequence of any one of SEQ ID NOs: 1322-2632;
b. nucleotide 1 through nucleotide 17 of a sequence that is at least 90% identical to a sequence of any one of SEQ ID NOs: 1322-2632;
c. nucleotide 1 through nucleotide 18 of a sequence that is at least 90% identical to a sequence of any one of SEQ ID NOs: 1322-2632;
d. nucleotide 1 through nucleotide 19 of a sequence that is at least 90% identical to a sequence of any one of SEQ ID NOs: 1322-2632;
e. nucleotide 1 through nucleotide 20 of a sequence that is at least 90% identical to a sequence of any one of SEQ ID NOs: 1322-2632;
f. nucleotide 1 through nucleotide 21 of a sequence that is at least 90% identical to a sequence of any one of SEQ ID NOs: 1322-2632;
g. nucleotide 1 through nucleotide 22 of a sequence that is at least 90% identical to a sequence of any one of SEQ ID NOs: 1322-2632;
h. nucleotide 1 through nucleotide 23 of a sequence that is at least 90% identical to a sequence of any one of SEQ ID NOs: 1322-2632;
i. nucleotide 1 through nucleotide 24 of a sequence that is at least 90% identical to a sequence of any one of SEQ ID NOs: 1322-2632;
j. nucleotide 1 through nucleotide 25 of a sequence that is at least 90% identical to a sequence of any one of SEQ ID NOs: 1322-2632;
k. nucleotide 1 through nucleotide 26 of a sequence that is at least 90% identical to a sequence of any one of SEQ ID NOs: 1322-2632;
l. nucleotide 1 through nucleotide 27 of a sequence that is at least 90% identical to a sequence of any one of SEQ ID NOs: 1322-2632;
m. nucleotide 1 through nucleotide 28 of a sequence that is at least 90% identical to a sequence of any one of SEQ ID NOs: 1322-2632;
n. nucleotide 1 through nucleotide 29 of a sequence that is at least 90% identical to a sequence of any one of SEQ ID NOs: 1322-1425 and 1427-2632; or
o. nucleotide 1 through nucleotide 30 of a sequence that is at least 90% identical to a sequence of any one of SEQ ID NOs: 1322-1425 and 1427-2632.

29. The RNA guide of any one of claims 25 to 28, wherein the spacer sequence comprises:
a. nucleotide 1 through nucleotide 16 of any one of SEQ ID NOs: 1322-2632;
b. nucleotide 1 through nucleotide 17 of any one of SEQ ID NOs: 1322-2632;
c. nucleotide 1 through nucleotide 18 of any one of SEQ ID NOs: 1322-2632;
d. nucleotide 1 through nucleotide 19 of any one of SEQ ID NOs: 1322-2632;
e. nucleotide 1 through nucleotide 20 of any one of SEQ ID NOs: 1322-2632;
f. nucleotide 1 through nucleotide 21 of any one of SEQ ID NOs: 1322-2632;
g. nucleotide 1 through nucleotide 22 of any one of SEQ ID NOs: 1322-2632;
h. nucleotide 1 through nucleotide 23 of any one of SEQ ID NOs: 1322-2632;
i. nucleotide 1 through nucleotide 24 of any one of SEQ ID NOs: 1322-2632;
j. nucleotide 1 through nucleotide 25 of any one of SEQ ID NOs: 1322-2632;
k. nucleotide 1 through nucleotide 26 of any one of SEQ ID NOs: 1322-2632;
l. nucleotide 1 through nucleotide 27 of any one of SEQ ID NOs: 1322-2632;
m. nucleotide 1 through nucleotide 28 of any one of SEQ ID NOs: 1322-2632;
n. nucleotide 1 through nucleotide 29 of any one of SEQ ID NOs: 1322-1425 and 1427-2632; or
o. nucleotide 1 through nucleotide 30 of any one of SEQ ID NOs: 1322-1425 and 1427-2632.

30. The RNA guide of any one of claims 25 to 29, wherein the direct repeat comprises:
a. nucleotide 1 through nucleotide 36 of a sequence that is at least 90% identical to a sequence of any one of SEQ ID NOs: 1-8;
b. nucleotide 2 through nucleotide 36 of a sequence that is at least 90% identical to a sequence of any one of SEQ ID NOs: 1-8;
c. nucleotide 3 through nucleotide 36 of a sequence that is at least 90% identical to a sequence of any one of SEQ ID NOs: 1-8;
d. nucleotide 4 through nucleotide 36 of a sequence that is at least 90% identical to a sequence of any one of SEQ ID NOs: 1-8;
e. nucleotide 5 through nucleotide 36 of a sequence that is at least 90% identical to a sequence of any one of SEQ ID NOs: 1-8;
f. nucleotide 6 through nucleotide 36 of a sequence that is at least 90% identical to a sequence of any one of SEQ ID NOs: 1-8;
g. nucleotide 7 through nucleotide 36 of a sequence that is at least 90% identical to a sequence of any one of SEQ ID NOs: 1-8;
h. nucleotide 8 through nucleotide 36 of a sequence that is at least 90% identical to a sequence of any one of SEQ ID NOs: 1-8;
i. nucleotide 9 through nucleotide 36 of a sequence that is at least 90% identical to a sequence of any one of SEQ ID NOs: 1-8;
j. nucleotide 10 through nucleotide 36 of a sequence that is at least 90% identical to a sequence of any one of SEQ ID NOs: 1-8;
k. nucleotide 11 through nucleotide 36 of a sequence that is at least 90% identical to a sequence of any one of SEQ ID NOs: 1-8;
l. nucleotide 12 through nucleotide 36 of a sequence that is at least 90% identical to a sequence of any one of SEQ ID NOs: 1-8;
m. nucleotide 13 through nucleotide 36 of a sequence that is at least 90% identical to a sequence of any one of SEQ ID NOs: 1-8;
n. nucleotide 14 through nucleotide 36 of a sequence that is at least 90% identical to a sequence of any one of SEQ ID NOs: 1-8;
o. nucleotide 1 through nucleotide 34 of a sequence that is at least 90% identical to a sequence of SEQ ID NO:9;
p. nucleotide 2 through nucleotide 34 of a sequence that is at least 90% identical to a sequence of SEQ ID NO: 9;
q. nucleotide 3 through nucleotide 34 of a sequence that is at least 90% identical to a sequence of SEQ ID NO: 9;
r. nucleotide 4 through nucleotide 34 of a sequence that is at least 90% identical to a sequence of SEQ ID NO: 9;
s. nucleotide 5 through nucleotide 34 of a sequence that is at least 90% identical to a sequence of SEQ ID NO: 9;
t. nucleotide 6 through nucleotide 34 of a sequence that is at least 90% identical to a sequence of SEQ ID NO: 9;
u. nucleotide 7 through nucleotide 34 of a sequence that is at least 90% identical to a sequence of SEQ ID NO: 9;
v. nucleotide 8 through nucleotide 34 of a sequence that is at least 90% identical to a sequence of SEQ ID NO: 9;
w. nucleotide 9 through nucleotide 34 of a sequence that is at least 90% identical to a sequence of SEQ ID NO:9;
x. nucleotide 10 through nucleotide 34 of a sequence that is at least 90% identical to a sequence of SEQ ID NO: 9;
y. nucleotide 11 through nucleotide 34 of a sequence that is at least 90% identical to a sequence of SEQ ID NO: 9;
z. nucleotide 12 through nucleotide 34 of a sequence that is at least 90% identical to a sequence of SEQ ID NO: 9; or
aa. a sequence that is at least 90% identical to a sequence of SEQ ID NO: 10 or a portion thereof.

31. The RNA guide of any one of claims 25 to 30, wherein the direct repeat comprises:
a. nucleotide 1 through nucleotide 36 of any one of SEQ ID NOs: 1-8;
b. nucleotide 2 through nucleotide 36 of any one of SEQ ID NOs: 1-8;
c. nucleotide 3 through nucleotide 36 of any one of SEQ ID NOs: 1-8;
d. nucleotide 4 through nucleotide 36 of any one of SEQ ID NOs: 1-8;
e. nucleotide 5 through nucleotide 36 of any one of SEQ ID NOs: 1-8;
f. nucleotide 6 through nucleotide 36 of any one of SEQ ID NOs: 1-8;
g. nucleotide 7 through nucleotide 36 of any one of SEQ ID NOs: 1-8;
h. nucleotide 8 through nucleotide 36 of any one of SEQ ID NOs: 1-8;
i. nucleotide 9 through nucleotide 36 of any one of SEQ ID NOs: 1-8;
j. nucleotide 10 through nucleotide 36 of any one of SEQ ID NOs: 1-8;
k. nucleotide 11 through nucleotide 36 of any one of SEQ ID NOs: 1-8;
l. nucleotide 12 through nucleotide 36 of any one of SEQ ID NOs: 1-8;
m. nucleotide 13 through nucleotide 36 of any one of SEQ ID NOs: 1-8;
n. nucleotide 14 through nucleotide 36 of any one of SEQ ID NOs: 1-8;
o. nucleotide 1 through nucleotide 34 of SEQ ID NO: 9;
p. nucleotide 2 through nucleotide 34 of SEQ ID NO: 9;
q. nucleotide 3 through nucleotide 34 of SEQ ID NO: 9;
r. nucleotide 4 through nucleotide 34 of SEQ ID NO: 9;
s. nucleotide 5 through nucleotide 34 of SEQ ID NO: 9;
t. nucleotide 6 through nucleotide 34 of SEQ ID NO: 9;
u. nucleotide 7 through nucleotide 34 of SEQ ID NO: 9;
v. nucleotide 8 through nucleotide 34 of SEQ ID NO: 9;
w. nucleotide 9 through nucleotide 34 of SEQ ID NO: 9;
x. nucleotide 10 through nucleotide 34 of SEQ ID NO: 9;
y. nucleotide 11 through nucleotide 34 of SEQ ID NO: 9;
z. nucleotide 12 through nucleotide 34 of SEQ ID NO: 9; or
aa. SEQ ID NO: 10 or a portion thereof.

32. The RNA guide of any one of claims 25 to 31, wherein the direct repeat comprises:
a. nucleotide 1 through nucleotide 36 of a sequence that is at least 90% identical to a sequence of any one of SEQ ID NOs: 2652-2669;
b. nucleotide 2 through nucleotide 36 of a sequence that is at least 90% identical to a sequence of any one of SEQ ID NOs: 2652-2669;
c. nucleotide 3 through nucleotide 36 of a sequence that is at least 90% identical to a sequence of any one of SEQ ID NOs: 2652-2669;
d. nucleotide 4 through nucleotide 36 of a sequence that is at least 90% identical to a sequence of any one of SEQ ID NOs: 2652-2669;
e. nucleotide 5 through nucleotide 36 of a sequence that is at least 90% identical to a sequence of any one of SEQ ID NOs: 2652-2669;
f. nucleotide 6 through nucleotide 36 of a sequence that is at least 90% identical to a sequence of any one of SEQ ID NOs: 2652-2669;
g. nucleotide 7 through nucleotide 36 of a sequence that is at least 90% identical to a sequence of any one of SEQ ID NOs: 2652-2669;
h. nucleotide 8 through nucleotide 36 of a sequence that is at least 90% identical to a sequence of any one of SEQ ID NOs: 2652-2669;
i. nucleotide 9 through nucleotide 36 of a sequence that is at least 90% identical to a sequence of any one of SEQ ID NOs: 2652-2669;
j. nucleotide 10 through nucleotide 36 of a sequence that is at least 90% identical to a sequence of any one of SEQ ID NOs: 2652-2669;
k. nucleotide 11 through nucleotide 36 of a sequence that is at least 90% identical to a sequence of any one of SEQ ID NOs: 2652-2669;
l. nucleotide 12 through nucleotide 36 of a sequence that is at least 90% identical to a sequence of any one of SEQ ID NOs: 2652-2669;
m. nucleotide 13 through nucleotide 36 of a sequence that is at least 90% identical to a sequence of any one of SEQ ID NOs: 2652-2669;
n. nucleotide 14 through nucleotide 36 of a sequence that is at least 90% identical to a sequence of any one of SEQ ID NOs: 2652-2669; or
o. a sequence that is at least 90% identical to a sequence of SEQ ID NO: 2670 or a portion thereof.

33. The RNA guide of any one of claims 25 to 29 or 32, wherein the direct repeat comprises:
a. nucleotide 1 through nucleotide 36 of any one of SEQ ID NOs: 2652-2669;
b. nucleotide 2 through nucleotide 36 of any one of SEQ ID NOs: 2652-2669;
c. nucleotide 3 through nucleotide 36 of any one of SEQ ID NOs: 2652-2669;
d. nucleotide 4 through nucleotide 36 of any one of SEQ ID NOs: 2652-2669;
e. nucleotide 5 through nucleotide 36 of any one of SEQ ID NOs: 2652-2669;
f. nucleotide 6 through nucleotide 36 of any one of SEQ ID NOs: 2652-2669;
g. nucleotide 7 through nucleotide 36 of any one of SEQ ID NOs: 2652-2669;
h. nucleotide 8 through nucleotide 36 of any one of SEQ ID NOs: 2652-2669;
i. nucleotide 9 through nucleotide 36 of any one of SEQ ID NOs: 2652-2669;
j. nucleotide 10 through nucleotide 36 of any one of SEQ ID NOs: 2652-2669;
k. nucleotide 11 through nucleotide 36 of any one of SEQ ID NOs: 2652-2669;
l. nucleotide 12 through nucleotide 36 of any one of SEQ ID NOs: 2652-2669;
m. nucleotide 13 through nucleotide 36 of any one of SEQ ID NOs: 2652-2669;
n. nucleotide 14 through nucleotide 36 of any one of SEQ ID NOs: 2652-2669; or
o. SEQ ID NO: 2670 or a portion thereof.

34. The RNA guide of any one of claims 25 to 29, wherein the direct repeat comprises:
a. nucleotide 1 through nucleotide 36 of a sequence that is at least 90% identical to SEQ ID NO: 2671;
b. nucleotide 2 through nucleotide 36 of a sequence that is at least 90% identical to SEQ ID NO: 2671;
c. nucleotide 3 through nucleotide 36 of a sequence that is at least 90% identical to SEQ ID NO: 2671;
d. nucleotide 4 through nucleotide 36 of a sequence that is at least 90% identical to SEQ ID NO: 2671;
e. nucleotide 5 through nucleotide 36 of a sequence that is at least 90% identical to SEQ ID NO: 2671;
f. nucleotide 6 through nucleotide 36 of a sequence that is at least 90% identical to SEQ ID NO: 2671;
g. nucleotide 7 through nucleotide 36 of a sequence that is at least 90% identical to SEQ ID NO: 2671;
h. nucleotide 8 through nucleotide 36 of a sequence that is at least 90% identical to SEQ ID NO: 2671;
i. nucleotide 9 through nucleotide 36 of a sequence that is at least 90% identical to SEQ ID NO: 2671;
j. nucleotide 10 through nucleotide 36 of a sequence that is at least 90% identical to SEQ ID NO: 2671;
k. nucleotide 11 through nucleotide 36 of a sequence that is at least 90% identical to SEQ ID NO: 2671;
l. nucleotide 12 through nucleotide 36 of a sequence that is at least 90% identical to SEQ ID NO: 2671;
m. nucleotide 13 through nucleotide 36 of a sequence that is at least 90% identical to SEQ ID NO: 2671;
n. nucleotide 14 through nucleotide 36 of a sequence that is at least 90% identical to SEQ ID NO: 2671; or
o. a sequence that is at least 90% identical to a sequence of SEQ ID NO: 2672 or SEQ ID NO: 2673 or a portion thereof.

35. The RNA guide of any one of claims 25 to 29 or 34, wherein the direct repeat comprises:
a. nucleotide 1 through nucleotide 36 of SEQ ID NO: 2671;
b. nucleotide 2 through nucleotide 36 of SEQ ID NO: 2671;
c. nucleotide 3 through nucleotide 36 of SEQ ID NO: 2671;
d. nucleotide 4 through nucleotide 36 of SEQ ID NO: 2671;
e. nucleotide 5 through nucleotide 36 of SEQ ID NO: 2671;
f. nucleotide 6 through nucleotide 36 of SEQ ID NO: 2671;
g. nucleotide 7 through nucleotide 36 of SEQ ID NO: 2671;
h. nucleotide 8 through nucleotide 36 of SEQ ID NO: 2671;
i. nucleotide 9 through nucleotide 36 of SEQ ID NO: 2671;
j. nucleotide 10 through nucleotide 36 of SEQ ID NO: 2671;
k. nucleotide 11 through nucleotide 36 of SEQ ID NO: 2671;
l. nucleotide 12 through nucleotide 36 of SEQ ID NO: 2671;
m. nucleotide 13 through nucleotide 36 of SEQ ID NO: 2671;
n. nucleotide 14 through nucleotide 36 of SEQ ID NO: 2671; or
o. SEQ ID NO: 2672 or SEQ ID NO: 2673 or a portion thereof.

36. The RNA guide of any one of claims 25 to 29, wherein the direct repeat comprises:
a. nucleotide 1 through nucleotide 36 of a sequence that is at least 90% identical to a sequence of SEQ ID NO: 2674 or SEQ ID NO: 2675;
b. nucleotide 2 through nucleotide 36 of a sequence that is at least 90% identical to a sequence of SEQ ID NO: 2674 or SEQ ID NO: 2675;
c. nucleotide 3 through nucleotide 36 of a sequence that is at least 90% identical to a sequence of SEQ ID NO: 2674 or SEQ ID NO: 2675;
d. nucleotide 4 through nucleotide 36 of a sequence that is at least 90% identical to a sequence of SEQ ID NO: 2674 or SEQ ID NO: 2675;
e. nucleotide 5 through nucleotide 36 of a sequence that is at least 90% identical to a sequence of SEQ ID NO: 2674 or SEQ ID NO: 2675;
f. nucleotide 6 through nucleotide 36 of a sequence that is at least 90% identical to a sequence of SEQ ID NO: 2674 or SEQ ID NO: 2675;
g. nucleotide 7 through nucleotide 36 of a sequence that is at least 90% identical to a sequence of SEQ ID NO: 2674 or SEQ ID NO: 2675;
h. nucleotide 8 through nucleotide 36 of a sequence that is at least 90% identical to a sequence of SEQ ID NO: 2674 or SEQ ID NO: 2675;
i. nucleotide 9 through nucleotide 36 of a sequence that is at least 90% identical to a sequence of SEQ ID NO: 2674 or SEQ ID NO: 2675;
j. nucleotide 10 through nucleotide 36 of a sequence that is at least 90% identical to a sequence of SEQ ID NO: 2674 or SEQ ID NO: 2675;
k. nucleotide 11 through nucleotide 36 of a sequence that is at least 90% identical to a sequence of SEQ ID NO: 2674 or SEQ ID NO: 2675;
l. nucleotide 12 through nucleotide 36 of a sequence that is at least 90% identical to a sequence of SEQ ID NO: 2674 or SEQ ID NO: 2675;
m. nucleotide 13 through nucleotide 36 of a sequence that is at least 90% identical to a sequence of SEQ ID NO: 2674 or SEQ ID NO: 2675;
n. nucleotide 14 through nucleotide 36 of a sequence that is at least 90% identical to a sequence of SEQ ID NO: 2674 or SEQ ID NO: 2675;
o. nucleotide 15 through nucleotide 36 of a sequence that is at least 90% identical to a sequence of SEQ ID NO: 2674 or SEQ ID NO: 2675; or
p. a sequence that is at least 90% identical to a sequence of SEQ ID NO: 2676 or a portion thereof.

37. The RNA guide of any one of claims 25 to 29 or 36, wherein the direct repeat comprises:
a. nucleotide 1 through nucleotide 36 of SEQ ID NO: 2674 or SEQ ID NO: 2675;
b. nucleotide 2 through nucleotide 36 of SEQ ID NO: 2674 or SEQ ID NO: 2675;
c. nucleotide 3 through nucleotide 36 of SEQ ID NO: 2674 or SEQ ID NO: 2675;
d. nucleotide 4 through nucleotide 36 of SEQ ID NO: 2674 or SEQ ID NO: 2675;
e. nucleotide 5 through nucleotide 36 of SEQ ID NO: 2674 or SEQ ID NO: 2675;
f. nucleotide 6 through nucleotide 36 of SEQ ID NO: 2674 or SEQ ID NO: 2675;
g. nucleotide 7 through nucleotide 36 of SEQ ID NO: 2674 or SEQ ID NO: 2675;
h. nucleotide 8 through nucleotide 36 of SEQ ID NO: 2674 or SEQ ID NO: 2675;
i. nucleotide 9 through nucleotide 36 of SEQ ID NO: 2674 or SEQ ID NO: 2675;
j. nucleotide 10 through nucleotide 36 of SEQ ID NO: 2674 or SEQ ID NO: 2675;
k. nucleotide 11 through nucleotide 36 of SEQ ID NO: 2674 or SEQ ID NO: 2675;
l. nucleotide 12 through nucleotide 36 of SEQ ID NO: 2674 or SEQ ID NO: 2675;
m. nucleotide 13 through nucleotide 36 of SEQ ID NO: 2674 or SEQ ID NO: 2675;
n. nucleotide 14 through nucleotide 36 of SEQ ID NO: 2674 or SEQ ID NO: 2675;
o. nucleotide 15 through nucleotide 36 of SEQ ID NO: 2674 or SEQ ID NO: 2675; or
p. SEQ ID NO: 2676 or a portion thereof.

38. The RNA guide of any one of claims 25 to 37, wherein the spacer sequence is substantially complementary to the complement of a sequence of any one of SEQ ID NOs: 11-1321.

39. The RNA guide of any one of claims 25 to 38, wherein the target sequence is adjacent to a protospacer adjacent motif (PAM) comprising the sequence 5′-NTTN-3′, wherein N is any nucleotide.

40. The RNA guide of claim 39, wherein the PAM comprises the sequence 5′-ATTA-3′, 5′-ATTT-3′, 5′-ATTG-3′, 5′-ATTC-3′, 5′-TTTA-3′, 5′-TTTT-3′, 5′-TTTG-3′, 5′-TTTC-3′, 5′-GTTA-3′, 5′-GTTT-3′, 5′-GTTG-3′, 5′-GTTC-3′, 5′-CTTA-3′, 5′-CTTT-3′, 5′-CTTG-3′, or 5′-CTTC-3′.

41. The RNA guide of claim 39 or 40, wherein the target sequence is immediately adjacent to the PAM sequence.

42. A nucleic acid encoding an RNA guide of any one of claims 25 to 41.

43. A vector comprising the nucleic acid of claim 42.

44. A vector system comprising one or more vectors encoding (i) the RNA guide as defined in any of claims 1 to 41 and (ii) a Cas12i polypeptide, optionally wherein the vector system comprises a first vector encoding the RNA guide and a second vector encoding the Cas12i polypeptide.

45. A cell comprising the composition of any one of claims 1 to 24, the RNA guide of any one of claims 25 to 41, the nucleic acid of claim 42, the vector of claim 43, or the vector system of claim 44.

46. The cell of claim 45, wherein the cell is a eukaryotic cell, an animal cell, a mammalian cell, a human cell, a primary cell, a cell line, a stem cell, or a T cell.

47. A kit comprising the composition of any one of claims 1 to 24, the RNA guide of any one of claims 25 to 41, the nucleic acid of claim 42, the vector of claim 43, or the vector system of claim 44.

48. A method of editing a BCL11A sequence, the method comprising contacting a BCL11A sequence with a composition of any one of claims 1 to 24 or an RNA guide of any one of claims 25 to 41.

49. The method of claim 48, wherein the BCL11A sequence is in a cell.

50. The method of claim 48 or 49, wherein the composition or the RNA guide induces a deletion in the BCL11A sequence.

51. The method of claim 50, wherein the deletion is adjacent to a 5′-NTTN-3′ sequence, wherein N is any nucleotide.

52. The method of claim 50 or 51, wherein the deletion is downstream of the 5′-NTTN-3′ sequence.

53. The method of any one of claims 50 to 52, wherein the deletion is up to about 50 nucleotides in length.

54. The method of any one of claims 50 to 53, wherein the deletion is up to about 40 nucleotides in length.

55. The method of any one of claims 50 to 54, wherein the deletion is from about 4 nucleotides to 40 nucleotides in length.

56. The method of any one of claims 50 to 55, wherein the deletion is from about 4 nucleotides to 25 nucleotides in length.

57. The method of any one of claims 50 to 56, wherein the deletion is from about 10 nucleotides to 25 nucleotides in length.

58. The method of any one of claims 50 to 57, wherein the deletion is from about 10 nucleotides to 15 nucleotides in length.

59. The method of any one of claims 50 to 58, wherein the deletion starts within about 5 nucleotides to about 15 nucleotides of the 5′-NTTN-3′ sequence.

60. The method of any one of claims 50 to 59, wherein the deletion starts within about 5 nucleotides to about 10 nucleotides of the 5′-NTTN-3′ sequence.

61. The method of any one of claims 50 to 60, wherein the deletion starts within about 10 nucleotides to about 15 nucleotides of the 5′-NTTN-3′ sequence.

62. The method of any one of claims 50 to 61, wherein the deletion starts within about 5 nucleotides to about 15 nucleotides downstream of the 5′-NTTN-3′ sequence.

63. The method of any one of claims 50 to 62, wherein the deletion starts within about 5 nucleotides to about 10 nucleotides downstream of the 5′-NTTN-3′ sequence.

64. The method of any one of claims 50 to 63, wherein the deletion starts within about 10 nucleotides to about 15 nucleotides downstream of the 5′-NTTN-3′ sequence.

65. The method of any one of claims 50 to 64, wherein the deletion ends within about 20 nucleotides to about 30 nucleotides of the 5′-NTTN-3′ sequence.

66. The method of any one of claims 50 to 65, wherein the deletion ends within about 20 nucleotides to about 25 nucleotides of the 5′-NTTN-3′ sequence.

67. The method of any one of claims 50 to 66, wherein the deletion ends within about 25 nucleotides to about 30 nucleotides of the 5′-NTTN-3′ sequence.

68. The method of any one of claims 50 to 67, wherein the deletion ends within about 20 nucleotides to about 30 nucleotides downstream of the 5′-NTTN-3′ sequence.

69. The method of any one of claims 50 to 68, wherein the deletion ends within about 20 nucleotides to about 25 nucleotides downstream of the 5′-NTTN-3′ sequence.

70. The method of any one of claims 50 to 69, wherein the deletion ends within about 25 nucleotides to about 30 nucleotides downstream of the 5′-NTTN-3′ sequence.

71. The method of any one of claims 50 to 70, wherein the deletion starts within about 5 nucleotides to about 15 nucleotides downstream of the 5′-NTTN-3′ sequence and ends within about 20 nucleotides to about 30 nucleotides downstream of the 5′-NTTN-3′ sequence.

72. The method of any one of claims 50 to 71, wherein the deletion starts within about 5 nucleotides to about 15 nucleotides downstream of the 5′-NTTN-3′ sequence and ends within about 20 nucleotides to about 25 nucleotides downstream of the 5′-NTTN-3′ sequence.

73. The method of any one of claims 50 to 72, wherein the deletion starts within about 5 nucleotides to about 15 nucleotides downstream of the 5′-NTTN-3′ sequence and ends within about 25 nucleotides to about 30 nucleotides downstream of the 5′-NTTN-3′ sequence.

74. The method of any one of claims 50 to 73, wherein the deletion starts within about 5 nucleotides to about 10 nucleotides downstream of the 5′-NTTN-3′ sequence and ends within about 20 nucleotides to about 30 nucleotides downstream of the 5′-NTTN-3′ sequence.

75. The method of any one of claims 50 to 74, wherein the deletion starts within about 5 nucleotides to about 10 nucleotides downstream of the 5′-NTTN-3′ sequence and ends within about 20 nucleotides to about 25 nucleotides downstream of the 5′-NTTN-3′ sequence.

76. The method of any one of claims 50 to 75, wherein the deletion starts within about 5 nucleotides to about 10 nucleotides downstream of the 5′-NTTN-3′ sequence and ends within about 25 nucleotides to about 30 nucleotides downstream of the 5′-NTTN-3′ sequence.

77. The method of any one of claims 50 to 76, wherein the deletion starts within about 10 nucleotides to about 15 nucleotides downstream of the 5′-NTTN-3′ sequence and ends within about 20 nucleotides to about 30 nucleotides downstream of the 5′-NTTN-3′ sequence.

78. The method of any one of claims 50 to 77, wherein the deletion starts within about 10 nucleotides to about 15 nucleotides downstream of the 5′-NTTN-3′ sequence and ends within about 20 nucleotides to about 25 nucleotides downstream of the 5′-NTTN-3′ sequence.

79. The method of any one of claims 50 to 78, wherein the deletion starts within about 10 nucleotides to about 15 nucleotides downstream of the 5′-NTTN-3′ sequence and ends within about 25 nucleotides to about 30 nucleotides downstream of the 5′-NTTN-3′ sequence.

80. The method of any one of claims 50 to 79, wherein the 5′-NTTN-3′ sequence is 5′-CTTT-3′, 5′-CTTC-3′, 5′-GTTT-3′, 5′-GTTC-3′, 5′-TTTC-3′, 5′-GTTA-3′, or 5′-GTTG-3′.

81. The method of any one of claims 50 to 80, wherein the deletion overlaps with a mutation in the BCL11A sequence.

82. The method of any one of claims 50 to 81, wherein the deletion overlaps with an insertion in the BCL11A sequence.

83. The method of any one of claims 50 to 82, wherein the deletion removes a repeat expansion of the BCL11A sequence or a portion thereof.

84. The method of any one of claims 50 to 83, wherein the deletion disrupts one or both alleles of the BCL11A sequence.

85. The method of any one of claims 50 to 84, wherein the deletion disrupts a GATAA motif of an enhancer region of the BCL11A gene.

86. The composition, RNA guide, nucleic acid, vector, cell, kit or method of any one of the previous claims, wherein the composition, RNA guide, nucleic acid, vector, cell, kit or method disrupts a GATAA motif of an enhancer region of the BCL11A gene.

87. The composition, cell, kit or method of any one of the previous claims, wherein the composition, cell, kit or method comprises at least two RNA guides targeting a GATAA motif of an enhancer region of the BCL11A gene.

88. The composition, cell, kit or method of claim 87, wherein the at least two RNA guides comprise at least 90% identity to:
(SEQ ID NO: 2677)
AGAAAUCCGUCUUUCAUUGACGGGAAGCUAGUCUAGUGCAAGC;
(SEQ ID NO: 2678)
AGAAAUCCGUCUUUCAUUGACGGCUGGAGCCUGUGAUAAAAGC;
and/or
(SEQ ID NO: 2679)
AGAAAUCCGUCUUUCAUUGACGGUACCCCACCCACGCCCCCAC.

89. The composition, cell, kit or method of claim 88, wherein the at least two RNA guides comprise at least 95% identity to:
(SEQ ID NO: 2677)
AGAAAUCCGUCUUUCAUUGACGGGAAGCUAGUCUAGUGCAAGC;
(SEQ ID NO: 2678)
AGAAAUCCGUCUUUCAUUGACGGCUGGAGCCUGUGAUAAAAGC;
and/or
(SEQ ID NO: 2679)
AGAAAUCCGUCUUUCAUUGACGGUACCCCACCCACGCCCCCAC.

90. The composition, cell, kit or method of claim 89, wherein the at least two RNA guides comprise at least two sequences of:
(SEQ ID NO: 2677)
AGAAAUCCGUCUUUCAUUGACGGGAAGCUAGUCUAGUGCAAGC;
(SEQ ID NO: 2678)
AGAAAUCCGUCUUUCAUUGACGGCUGGAGCCUGUGAUAAAAGC;
and/or
(SEQ ID NO: 2679)
AGAAAUCCGUCUUUCAUUGACGGUACCCCACCCACGCCCCCAC.

91. The composition, RNA guide, nucleic acid, vector, cell, kit or method of any one of the previous claims, wherein the RNA guide consists of the sequence of:
(SEQ ID NO: 2677)
AGAAAUCCGUCUUUCAUUGACGGGAAGCUAGUCUAGUGCAAGC;
(SEQ ID NO: 2678)
AGAAAUCCGUCUUUCAUUGACGGCUGGAGCCUGUGAUAAAAGC;
and/or
(SEQ ID NO: 2679)
AGAAAUCCGUCUUUCAUUGACGGUACCCCACCCACGCCCCCAC.

92. The composition, RNA guide, nucleic acid, vector, cell, kit or method of any one of the previous claims, wherein the RNA guide does not consist of the sequence of:
(SEQ ID NO: 2677)
AGAAAUCCGUCUUUCAUUGACGGGAAGCUAGUCUAGUGCAAGC;
(SEQ ID NO: 2678)
AGAAAUCCGUCUUUCAUUGACGGCUGGAGCCUGUGAUAAAAGC;
and/or
(SEQ ID NO: 2679)
AGAAAUCCGUCUUUCAUUGACGGUACCCCACCCACGCCCCCAC.
